United States Patent Application Publication US 2014/0199313 A1 - sequence listing, part 13

SEQ ID NO: 68413 - protein, 601 aa, Schizosaccharomyces pombe 972h-
MKTASIHFWSTLVLLFSCIGSVIAYSSTDLTTMYDWNQIIKPLEWGQMNFIHTTDTHGWLNGHLRDARYKADFGEFKSFVLRMKELADFKDVDLLLVDTGDLHDGNGLSDASDPEGIYTNNIFTYLPYDILTIGNHELYQASVSNNTHEYFVPHWNGTYLASNVQIFNSSNELEQFAAESAYFTTKHGVRVLAVGFLYDFTGNANNTVVTPVETAVNSRWYQQQINRTDVDLFLLLGHIPVRDWDEWKSLHASIRKVHPDTPIQIFGGHSHIRDFAVYDESSVSLEGGRYCETVGWLSIDGLAASNATRQYVGRPVTNETRQSYPNLPIPNTPLYYTRRYIDFNRQNFRFHTQQSEDSFDTPEGIELSKIIKQYRDDLNLSYVFGCVPKNYYMTEVSPQSDDSIFKLMTDRVLPEIITNRNRSTVPRIIISNGGGIRGSMYQGKFGPDEMFQLNPFLTNYYMYLADVPYKYAKKLYSTLNGGSNLRNINENLAALNPGYVTSDDFGEDGDDTVHTSVPSYATPNILQAQAGFNATSSPETIDVVFLNFLQSIVLKALNNMANDTLYTSSNVTQYWVRDDGYDSSPYSFAYFVQQEWSDNCD

SEQ ID NO: 68414 - DNA, 1758 bp, Eremothecium gossypii
  CDS (1)..(1758)
atgaagtttttgaatattggtcttttgttagctggtgccacggctgcaatagttccagatgatgtggacaaggacactgattcagcggattccataagcttacgcgagttgaagcttggccaattaaattttttacataccactgatacccacggatggctaggatctcatgtatcacaaccagactatgatgcgacttggggtgactatgtctcctttgcccagcggttcagagaacgagtgaaagacaaggaccttattttgatcgactctggtgacaaacgtaccggtaatggtctcagtgatctcactagtccgatgggtttgaagtcaagcggtatctttaaccttcagaaacttgacttgttaactctcggtaatcatgaactgtatacggaagatgtggttcgcttggaatactatggaacagcaatggagcctgagctaagtgataaatatgtcacaagcaatgtggaatttatcacagaagatggggacgtgtatccgttcggcaataaatataggtactttgaaacgccaaaccagaatctacgtgtattggcgttcgcattcatgttcgattttccgtgggctgctaaaaatgttaggttaacccctctggccgaagaggttaaaaaggactggttcacccaaactgtggaaaagtaccccgctgacaagcttgatattatagttgtcttcggtcatttaccagtcacccgtggcgaaaacgaagagcttctgcagttacacaaacgactaagggaatcttaccctgacactattatccagtacttcggaggtcatactcatgtcagagatttcgtggttttggacgaaaaagcgactgcgttacaaagcggcagatattctgaaacagtgggattcctatcgatagatgatgttgctaaagaaaagccagagtttttcagatcctatatggactttaacctgagatcctttatgcaccattctgggtataagaacatcgaagagttccgtacaaaggacggagaatatgtgaacgcacaaattgaagagcttcgtgagaaactcgggttaaatactgtatttggatatgttccagaggattattatctagatgcagaaccaattgaatctccaaacaacatctacaacttcctcaccaacaagatccttccaacgttgcgctccgatgcatatgatgaaactgtgtctcgcttcatcatgataaacactggttccatgagatatgacttatatagaggtaacttcacggccgatgttgaatacattgtgacaccgtatcagaatgattggaaatacatagaagtaccaacaaaattgggaggaatactggccgcgtacatgaatagtggcaagccaatcttcacatcgattgcgaatgaactacctagactttctcgcagagattctagatgcccagtaattactgatgcgaacctatccagaggctacactactgcagacgacgccggttgcacaggcgacgacacgcctcaccaatcaacaccatcttaccctgttccaaatgtagtacaatctgttgagattaacgaagaagctggagaagatggtactgcgcacctagtcttttatagttttatggagaaaagaattgtggtcgcactaaacgagttaaacattttacagaaagtaacaaccaaaacctattcagcagctgatgttaaactatatggtggacccaacagtaggcaattgctgagaaattatttcaagtctctttcctattaa

SEQ ID NO: 68415 - protein, 585 aa, Eremothecium gossypii
MKFLNIGLLLAGATAAIVPDDVDKDTDSADSISLRELKLGQLNFLHTTDTHGWLGSHVSQPDYDATWGDYVSFAQRFRERVKDKDLILIDSGDKRTGNGLSDLTSPMGLKSSGIFNLQKLDLLTLGNHELYTEDVVRLEYYGTAMEPELSDKYVTSNVEFITEDGDVYPFGNKYRYFETPNQNLRVLAFAFMFDFPWAAKNVRLTPLAEEVKKDWFTQTVEKYPADKLDIIVVFGHLPVTRGENEELLQLHKRLRESYPDTIIQYFGGHTHVRDFVVLDEKATALQSGRYSETVGFLSIDDVAKEKPEFFRSYMDFNLRSFMHHSGYKNIEEFRTKDGEYVNAQIEELREKLGLNTVFGYVPEDYYLDAEPIESPNNIYNFLTNKILPTLRSDAYDETVSRFIMINTGSMRYDLYRGNFTADVEYIVTPYQNDWKYIEVPTKLGGILAAYMNSGKPIFTSIANELPRLSRRDSRCPVITDANLSRGYTTADDAGCTGDDTPHQSTPSYPVPNVVQSVEINEEAGEDGTAHLVFYSFMEKRIVVALNELNILQKVTTKTYSAADVKLYGGPNSRQLLRNYFKSLSY

SEQ ID NO: 68416 - DNA, 1887 bp, Neurospora crassa
  CDS (1)..(1887)
atggctgtcaaagcctcaatccttgtcgccagtgctattgcgacactggcacgggcagcgcagcccggagctgcatctcccatcgccgcgcctatgcgagacctcgtctggggcaagctcaacttcctccacacgacagacacccacggctggcatggcggtcatcttcaagaagcacagtattcggcggactggggtgattacatatcctttgccgaacatctccgcgaagaagcagatgggcagggcgttgatctgctccttgtcgacaccggcgatcgcgtcgaaggaaatggactctacgacgcctcgaatcccaaggggaaatactactatgacatataccgcgagcaggacgttgacatcatatgcacggggaaccacgagctgtatcatgcctcgactgccgatggagaacacctgcggaccgtcccgaacttccaggacaagtacgttgcgtccaatctggactacatcgaccctaagacgggactgcagatccccatggcgcagcggtaccgcaagttccagaccaagaaccagaagctgactattgtcgccatgggttttcttttcgactttaccggaaatgccaataacacagtggtacagcccgtgagggagaccatcaaggagcaatggttccaggacgccatccgggagaaccccgatgtgtttgtggtgattggtcacgtcggcgtgaagatgcccgagttcaaggagatctttacagccattcgtaagcagaatcgattaacgcccatcctgttcttcggcggccatgtgcacgtgcgtgacgcgacggcgtatgactccagatcgttcgctatcgccagcggccgttactttgaaacgatcggctggatgtcggtggacggtgacctgaagaggacaaccaaagatgtcgtcgctgctgctgtcaatgacgacgagccgccttcgactgaggccgcggaattctcgttccaccgtaggtacatcgacaacaacctactgggcctctactatcacaccgggttgaacaagtccacatttcctacagaccacggccgaaatgtatcacaaatgatcgcccaggcccgcaaggatctcgatctggactacacgttcggctgtgcaccaaagaacctgtggatgacgagggcgccctatccctccgaggacagcatctacacgtggctcgagaaggaggttcttccagagatcgccatcaacgacgacaggaaagatgtccctcgtctggttatcatgaacaccggtgccatccgcttcgatgtcttcaagggcaaatttaccagagatacaacgtatatcatctcgcccttcctcagcgtcctcaactacatccccgacgtcccttacgaggttgccagtaaagttatcggcttactcaacaacgctgggcggatcatggaggagcatgctcctatggatgctcgatttatggccatcccggagcagtttgccatcacacaggacattattcatgagaagccaatgccttccttcgcgactgagggtcttgtggacgggcaaaagcccctgtcgggtgatggcgcctctaagaaggagcccgttttgatcgaaggctatacgacaaaggatgatattggtgacgatggcgatgatgctatccactctgccattaacttctatgtcgtgcctaactgcatccaggccgaagttgggttctcgcccaaggaggagggcgagaagcctgaaaaggttgatctcgtgttctttgatttcattcaaccatgggtcatggttgcgctgaagatctccggaggcgactacactaatgatgatgccaagagatatgtcaatgggacctttacggaattgatggcgggctggattaaggagaactggcctgctaactgttag

SEQ ID NO: 68417 - protein, 628 aa, Neurospora crassa
MAVKASILVASAIATLARAAQPGAASPIAAPMRDLVWGKLNFLHTTDTHGWHGGHLQEAQYSADWGDYISFAEHLREEADGQGVDLLLVDTGDRVEGNGLYDASNPKGKYYYDIYREQDVDIICTGNHELYHASTADGEHLRTVPNFQDKYVASNLDYIDPKTGLQIPMAQRYRKFQTKNQKLTIVAMGFLFDFTGNANNTVVQPVRETIKEQWFQDAIRENPDVFVVIGHVGVKMPEFKEIFTAIRKQNRLTPILFFGGHVHVRDATAYDSRSFAIASGRYFETIGWMSVDGDLKRTTKDVVAAAVNDDEPPSTEAAEFSFHRRYIDNNLLGLYYHTGLNKSTFPTDHGRNVSQMIAQARKDLDLDYTFGCAPKNLWMTRAPYPSEDSIYTWLEKEVLPEIAINDDRKDVPRLVIMNTGAIRFDVFKGKFTRDTTYIISPFLSVLNYIPDVPYEVASKVIGLLNNAGRIMEEHAPMDARFMAIPEQFAITQDIIHEKPMPSFATEGLVDGQKPLSGDGASKKEPVLIEGYTTKDDIGDDGDDAIHSAINFYVVPNCIQAEVGFSPKEEGEKPEKVDLVFFDFIQPWVMVALKISGGDYTNDDAKRYVNGTFTELMAGWIKENWPANC

SEQ ID NO: 68418 - DNA, 1857 bp, Magnaporthe grisea 70-15
  CDS (1)..(1857)
atggcttttagaacaacactagtcggatgcgtcacggccgcgctggccacggtcgggcgcgcgtcccagcctggagcagccaaaccggttgaagctccgatgagggacctccagtgggcacagctcaactttctgcacacgaccgacacccacggctggcacggtggtcacctcctcgagtcccagtactcggcagactggggtgactatgtttcttttgccgagcacctccgccaccgcgccgaccaggaaggccgcgacttgctgctggtcgacacgggcgacaggattgagggcaacgggctttacgactcttcggaccccaagggccgcttcacctacgacatattccgtcggcaggacattgatatcatctgcaccggcaaccatgagctctaccaagccgacgccgctgaccgcgaatggtcgcagactgtcccgaacttcaaggacaagtacatcgcctccaacctcgattacatacacccagagacgggcgagaagaaacccatggctcagcggtttcgtagattcaaaacaaagaaccaaaagatggacgtcctagccatgggttttctgtttgactttaccggtaacgccaacaacacagtcgtacaacctgttgaggacactgtcgaggaagagtggttcaagaatgcgatcaaggagaagcctgacatctttgtcataattggacacgtcgggttacggatgcaagagtttaagcacatctttacagagatccggaagcaaaactggttcactccaattgctttctttggaggacatgcgcatgttagagacgccgtcaagttcgacgacggcgcttatgctatcgcaagtggtcggtactttgagactatagggtggatgtcggtagatgggctctacaaagacactaccaagggcaagacgccagtcaaattccagaggcggtacatcgacaacaacctgttggggttgtaccatcacactggactcaaccagtccacctttcctaccaagaagggccaagaagtgactgaaatgattacggccgccagaaaagagctcaagctggatgagaagtacggatgtgcacctcagacctactggatgaaccgcgctccttaccctggaaatgagagcgtttatacctggctggaaacggaagtgctgccaaaagtcgccgtcaatgaagagaggaagaacaattcccggctggctatcttgaacaccggtgggataaggttcgacatcttcaagggcccgtttaccagggactcgacttttattgtcagccctttcacctcgggactgaactacgtcaaggatgtaccatatgaggttgcccaaaagctcattaagctgctcaacaacggcggaccgattcttgcggccggacaaggtgtgccagacctgcgattcatggcctcaccagagcagtggttccgtaccgaggacgtcgtcgtcaccgactcgacatcgaccccgtctcattcattcaccgctgaggatttcgaccagaagcctttgagccatcatgataaacacaaaccggccttgattggtggctacacaaccaaggacgacatatctgatgatggcgacgatgcggtgcattcgccattgtcattctatagagtaccgaactgtgtccaggccgaggttggctttcccgtcgatgatgacggaaagaagaagaaccctgaaaaggtggacgttgtcttcatcagcttcatccagccgtgggttttgctcgccctcaagtttgcgggaggcgactatacctcggatgacgttggtgtctatcggaacggaacctttaccgagatgatggccgactggatccaggagaactggaagggagactgctga

SEQ ID NO: 68419 - protein, 618 aa, Magnaporthe grisea 70-15
MAFRTTLVGCVTAALATVGRASQPGAAKPVEAPMRDLQWAQLNFLHTTDTHGWHGGHLLESQYSADWGDYVSFAEHLRHRADQEGRDLLLVDTGDRIEGNGLYDSSDPKGRFTYDIFRRQDIDIICTGNHELYQADAADREWSQTVPNFKDKYIASNLDYIHPETGEKKPMAQRFRRFKTKNQKMDVLAMGFLFDFTGNANNTVVQPVEDTVEEEWFKNAIKEKPDIFVIIGHVGLRMQEFKHIFTEIRKQNWFTPIAFFGGHAHVRDAVKFDDGAYAIASGRYFETIGWMSVDGLYKDTTKGKTPVKFQRRYIDNNLLGLYHHTGLNQSTFPTKKGQEVTEMITAARKELKLDEKYGCAPQTYWMNRAPYPGNESVYTWLETEVLPKVAVNEERKNNSRLAILNTGGIRFDIFKGPFTRDSTFIVSPFTSGLNYVKDVPYEVAQKLIKLLNNGGPILAAGQGVPDLRFMASPEQWFRTEDVVVTDSTSTPSHSFTAEDFDQKPLSHHDKHKPALIGGYTTKDDISDDGDDAVHSPLSFYRVPNCVQAEVGFPVDDDGKKKNPEKVDVVFISFIQPWVLLALKFAGGDYTSDDVGVYRNGTFTEMMADWIQENWKGDC

SEQ ID NO: 68420 - DNA, 1869 bp, Gibberella zeae PH-1
  CDS (1)..(1869)
atgattcttcggagtaaaacacttgctgctggctcagcgctggtcgctgtagctcgcgcatcgcaacccggagctgcagcgccggtaccaggtcccatgagagaccttacttggggtcagattaactttatccacacaacggatacacatggctggattggcggccacttacaagaacctcaatattctgctgattggggtgactacatctccttcaccaagcacatgcgcgaccaagccgacaagaggggatccgacctactagtcatcgataccggcgatcgcatcgagggcaatggcttatatgacgcctcaacccccaagggcctcttccaatatgacatctacgccgaagccgatgtcgacatcatgtctaccggcaatcatgagctttacaaggcctactcggctgatatggaacacaacaccactgttcccaactacaagaacagctacctcgcatccaaccttgactacatcagtttcgagaccggcgatcgcgttccccaagccccgcgctacaagaagttcaagacaaagaaccagggtctcaacattgtggcgttcggctttctcttcgactttaccggaaatgccaacaacacggttgttcagcccgtggaggacaccatcaaggaagattggttccaggaagctatccatgagaagcctgatctcttcgtcgtgattggccatgttggtcttcgcatggaagagttcaaggttatctatactgccattcgaaaacagaactggcacattcccattgctttcttcggcggccatgcgcatgttcgcgatactgtccagtatgactccaaggctttggccatagccagtggccgctatttcgagaccattggatggatgtcaatagacggtattaagaaaggcggtgccaaggacgttgaggcagctgcttctcctacctttactcgccgatacatcgacaacaacctctatggcctacactatcacactggtctcaacgaaacgacattctccacagagaatggaaagagagtcagcaagatgattacccgtgcccgcaaggctcttcagctcgattacacgttcggctgcgctcctaagacactctggatggctcgggccaagcccactgacgaggatagcatttaccattggatctcaaatcatctcttgcctgatgtcatcactcgcaaggatcgcaaagacaagtcgagactggccatcttcaacactggtggaatccgatttgacattttcaagggcggtttcacacgagacagcacttatgctgtctgcccctttgacagtggatttaaatacatccctgacgtcccatacaaagccgctgccaaggttattgatctcctcaacagcgctggaagaatctttgctgagaacggccttgacgttaagtatatggccatgcccgagcaagctttccccgctcctgtcatgaaggctcagttcgagaggaacaagatagatgcagaagagtcccgtctggaacttcgaagtctcttcgataaacctgatttgactgccggctatactaccatagacgatatcggcgccgacggcgatgataccattcacgagccagtcaagttttatcagcagcccaactgtgtccaggctgagattaacatgcccaaggatggtgagccagagacagttgactttgtattccttgactttatccagccatggattatccctgccctgagactcgcaggagcgggccattttagtgatgctgatgtcgagcggtatattgagggttcttttacgtatcacatggccgattggattagcaagaactggcagtttcatgtgccccaggattccgaagtgagtaccaacttcagtatcacgtactga

SEQ ID NO: 68421 - protein, 622 aa, Gibberella zeae PH-1
MILRSKTLAAGSALVAVARASQPGAAAPVPGPMRDLTWGQINFIHTTDTHGWIGGHLQEPQYSADWGDYISFTKHMRDQADKRGSDLLVIDTGDRIEGNGLYDASTPKGLFQYDIYAEADVDIMSTGNHELYKAYSADMEHNTTVPNYKNSYLASNLDYISFETGDRVPQAPRYKKFKTKNQGLNIVAFGFLFDFTGNANNTVVQPVEDTIKEDWFQEAIHEKPDLFVVIGHVGLRMEEFKVIYTAIRKQNWHIPIAFFGGHAHVRDTVQYDSKALAIASGRYFETIGWMSIDGIKKGGAKDVEAAASPTFTRRYIDNNLYGLHYHTGLNETTFSTENGKRVSKMITRARKALQLDYTFGCAPKTLWMARAKPTDEDSIYHWISNHLLPDVITRKDRKDKSRLAIFNTGGIRFDIFKGGFTRDSTYAVCPFDSGFKYIPDVPYKAAAKVIDLLNSAGRIFAENGLDVKYMAMPEQAFPAPVMKAQFERNKIDAEESRLELRSLFDKPDLTAGYTTIDDIGADGDDTIHEPVKFYQQPNCVQAEINMPKDGEPETVDFVFLDFIQPWIIPALRLAGAGHFSDADVERYIEGSFTYHMADWISKNWQFHVPQDSEVSTNFSITY

SEQ ID NO: 68422 - DNA, 1758 bp, Candida glabrata CBS138
  CDS (1)..(1758)
atgctgtggttggtgtttttattgtttgtgaaggttattggtgcctttccgacagaacagttctttagtactagtgaatatgctgcatcgctagaattaagacctataaaattaggtaagattaattttctgcacacgacagacactcatggttggttagggtctcatctgctgcagagagattttaacgctgattggggcgacttcatatcatttgtggaattgtttcgcaagaacagaataaatagcaagaaccaggatctaattgtgcttgatactggagataagcgagatggcaatggtttgagcgatgccacttctttagtaggtatgaactcgtcagtcatttttaatgaaatggactttgacttattgacattggggaaccacgaattgtacactgaagaggcttcaatattagagtattatgggacagctctttctggtaagttcaaggacaaatatgtttcgagcaatgtcgaattcattgatgacaaaggtagcaaacacgcatttggtaataaatatttgtgtttcaaaactacaaataccaagaccaaaattttagcgctatcttttatttttgattttaagagatataatcgtaaaacaatagtaacaccagcaatacaagaaataaagaaaccttggttctccgatatggttaaatcatatacagaagatgacatagatatggtactagtgtttggtcatattcctgctaggggtgaggctgatgatgaacttctatcgatacataaagaactccgaaagtactacccaaatattgtcattcaatattttggcggccatacccacattagagatttcaagattatggatgataagtcaacatgtctacaaagtggaaaattctcagaaactgttggatttttatccattgataatttagatagtcaaaatgttactttctcaagaagatatttggattttagtaaaaggtcatttaagtttcatgcaggcgtgaagtctttgaccacaacgctaggtgatagcgtttcgaaggcaatttcaaaacttagaacgcatttaggactaaacgaaattattgggtatgtaccccatacgttttatatgtctgccagaccattaaactcatcagagaatatctataatttattgtcaaccaaagttctccctctattagaaacgccaaaaggtttattttcacattctaggattattatgataaactctggttcagtaagatatgacttatataaaggtccatttactaaggatactgaatatatcgtgatgcctttccctaacttttggaaatatattaggttgccacttaaagtagctattcagattgaaccagcgttaaataacgggcctgtaatcgcccatttagtaccacctgagggaagagttggtagtaaattggtagcatcctctcaaaagtgtccttttgtgactaatccgaaattaagtgagggttttactacagttgatgatgcaggttgtgatggggacgatactccacatagatcacaatattatcatgatattcctaacgtggttcaatgcattcaagtacacgatgaggaacctgatacaattgtggattttatatactatagttttatggaagacagtgtcatcactgctattaatttcatattagggcagcttgaaggagaagatcacaaaaatgttactaggggcgacactcttcattacggtggtagagcaacaaaggaacttttaaaggcatacatcaaatcaatttaa

SEQ ID NO: 68423 - protein, 585 aa, Candida glabrata CBS138
MLWLVFLLFVKVIGAFPTEQFFSTSEYAASLELRPIKLGKINFLHTTDTHGWLGSHLLQRDFNADWGDFISFVELFRKNRINSKNQDLIVLDTGDKRDGNGLSDATSLVGMNSSVIFNEMDFDLLTLGNHELYTEEASILEYYGTALSGKFKDKYVSSNVEFIDDKGSKHAFGNKYLCFKTTNTKTKILALSFIFDFKRYNRKTIVTPAIQEIKKPWFSDMVKSYTEDDIDMVLVFGHIPARGEADDELLSIHKELRKYYPNIVIQYFGGHTHIRDFKIMDDKSTCLQSGKFSETVGFLSIDNLDSQNVTFSRRYLDFSKRSFKFHAGVKSLTTTLGDSVSKAISKLRTHLGLNEIIGYVPHTFYMSARPLNSSENIYNLLSTKVLPLLETPKGLFSHSRIIMINSGSVRYDLYKGPFTKDTEYIVMPFPNFWKYIRLPLKVAIQIEPALNNGPVIAHLVPPEGRVGSKLVASSQKCPFVTNPKLSEGFTTVDDAGCDGDDTPHRSQYYHDIPNVVQCIQVHDEEPDTIVDFIYYSFMEDSVITAINFILGQLEGEDHKNVTRGDTLHYGGRATKELLKAYIKSI

SEQ ID NO: 68424 - DNA, 1914 bp, Kluyveromyces lactis NRRL Y-1140
  CDS (1)..(1914)
atgtttagcaaactcagagtaccctggacgaaaggtagctcttttatgcagtttattgccaaacaaagaaccgtgaaatttactacttctttttggaggatatacaggtgtgttcttccaccgacgatgattgaactactgagtgttgtagtattggcagtttatgcccttcccttttttctatcctgtacgttaggggccgttttacctttcactccacaacaaagtgttttatccacagtagaacgtgaaactgataaacttagagatttagacattggacaattgaattttttacacaccacggacactcacggttggttaggctctcatttaaaccaggacaattataatgccaaatggggagatctcatttcatttattgataagttcaagcgaaatgtagttcgtgacaacgatctcttgataatcgatacaggcgacaagcacgatggaaatgggttcagtgatgcgacccagccaaatggattgaactctactcagatatttaatgaactggattatgatttattgacgttgggaaaccatgaattatacgttgaggacaatactgttttggaatattacgaaacagttatgaatcccaaattcagcaataaatatgtttcgagcaatgtggaattcatcaaagaagatggatcagttgtgccatttggctctaagtatcgttactttaaaacagagaaacacggtttaagagtcttggcattatcctttctattcgacttcaagaggtataacaaaagagcccaagtaacaccggtttccaaagaaattaaaaaaccttggttcaatgaagttactggaaactactccagggaagaggttgacattttattggtttttgggcatatgcctattagtgacccagaaaatcgcgagatcaaccatctacatgcaaagttaaggcatatttatccgaacactgtcatccaatacttcggtgctcacactcatatccgcgattttgtagaattagacaacaaggcgtctgctcttcaaagtggaagattctgtgagactgtaggatttgcatcaattgacgacattacgaaggaatcccctgttgtgtcaagaaaatacattgacttcaacttagattctttcttgcatcattcaaagagcaggaacaccaaggaatttgacaccgaaaagggcgtcgaagtcaatcagcgtttagatcgtttaagagaatatttgaacttaactaccaaatatggtgatgtaccttccacttattacatgtacaataaacccctctcctcaccgcacaatatttatcatcttttaaccgaaaaagtgctacctagattagcgcctgaaaattcagatgccaacgaatcgttaacctcccgaataataatgataaatactggtgcaatcaggtacgacttatataaaggccctttcacagctgacactgagtatactatttcacccttctcaaattcatggaactatattcaattacctgcgaggttagcgatacaagtcgaatcatatttaaatggcctgggtccgattctgacgttgaacgccgtgggtaaagaacatcgccaatgtccatttgttgatgataaaacactctccaaaggatataccacatccgacgatcttggatgtgaaggcgacgacacagcacaccgcagtgaacatcaatacaggattcctaacgttgtacagtccgttgatattgttgatgaagatgaagataaagttgatttcgtgtatgttagttttatccagcccttcgttttgcaagccttgaacgacttaaatgaagatcaaaacatcgtgaaccactcattcaatgagtcggactgtagaatttatggtgttacatcaataaaggatcttcttcgtggatatatcatctcactaaaccagtcataa

SEQ ID NO: 68425 - protein, 637 aa, Kluyveromyces lactis NRRL Y-1140
MFSKLRVPWTKGSSFMQFIAKQRTVKFTTSFWRIYRCVLPPTMIELLSVVVLAVYALPFFLSCTLGAVLPFTPQQSVLSTVERETDKLRDLDIGQLNFLHTTDTHGWLGSHLNQDNYNAKWGDLISFIDKFKRNVVRDNDLLIIDTGDKHDGNGFSDATQPNGLNSTQIFNELDYDLLTLGNHELYVEDNTVLEYYETVMNPKFSNKYVSSNVEFIKEDGSVVPFGSKYRYFKTEKHGLRVLALSFLFDFKRYNKRAQVTPVSKEIKKPWFNEVTGNYSREEVDILLVFGHMPISDPENREINHLHAKLRHIYPNTVIQYFGAHTHIRDFVELDNKASALQSGRFCETVGFASIDDITKESPVVSRKYIDFNLDSFLHHSKSRNTKEFDTEKGVEVNQRLDRLREYLNLTTKYGDVPSTYYMYNKPLSSPHNIYHLLTEKVLPRLAPENSDANESLTSRIIMINTGAIRYDLYKGPFTADTEYTISPFSNSWNYIQLPARLAIQVESYLNGLGPILTLNAVGKEHRQCPFVDDKTLSKGYTTSDDLGCEGDDTAHRSEHQYRIPNVVQSVDIVDEDEDKVDFVYVSFIQPFVLQALNDLNEDQNIVNHSFNESDCRIYGVTSIKDLLRGYIISLNQS

SEQ ID NO: 68426 - DNA, 1920 bp, Debaryomyces hansenii CBS767
  CDS (1)..(1920)
atgaacatgattgaaaataagaggaagtgtcagtatggctttattgtattggcgtttattttaggtatatttttgtttccggtttcatggcttcaactaagtaaacagcacaaatcagactcatcgttgataaggaatatagagtggaatgatataaattttattcacactactgatacacacggctggtattctggacatattaaccagaaacagtacaatgctgattggggagattttatatcttttactattcatctaagggacatagctcattcaaaaaagcaagattttttgttagttgatactggtgatagacatgatgggaatggactctcagatgtaacaataccaaatggtgctaaatctttgccgatatttatgaggcaggactatgacctccttactattggaaaccacgaattatatatctgggaaaactcccaacaagaatatgatttggtccgtgatcattttaaatcgaactatattagtactaatgtggaatacaaattacaaaatggaacatatattcctatgggtcaaaggtataagtacttcacaacaccaattcaaagtattagaatattgtcatttgcattcttgtttgacttcgctaggtacaattcggagacaaaagtcgaaccaatcatgaaagttctagacgaagattggttcaaagatattttgattgatcatcctgctgatgaagtcgatttacttgtaataattggacatatcccagtgagtcataacgatgaagagttgttccaattacatctgtttttaaggaaatattaccctaagaccaaaatccaatattttggtgggcattcacatataagagatttcagcatatatgatgaatatctgactggtttgcaaagtggaagattttgtgaaactgctggctgggtaagtattaatttagagtctgccaataataatttgaatggggtagataaggttaaaaacacattctcgaggtcctacattgatttcaacttaaactcatttatgtaccatacaaatataagctcaactgaagagtttcatacgggagtaggattgaatgtttcaagacagattagtgatacccgtaaggaattgaacttagaagcgataatcggttatgttagaaacagtaattatttcatggattatgtttcaataacgaatccgaaaaatatttttaaactcttgactgataaagtattgcctacattagaaattgaaaatccagatatagcaacttcagaccagaggttaattataattaatactggttcgataaggtatgatctatacaaaggtccatatacattggattctcagtatataatttctccttttgaaaatgattgggtaaagttgacattacctaaaaatgtggctataaagatagctcccaagttgaatgagttacagtatattattcgttctgcaagcgataatacatttgacaacagacggttgttacctgagcatcaatattccagacttctcaaaaacgattatgcgagttttaataagcgtacagaagattgggggcaacatcatttcgaaaatcgtgcttccgaaaggtttcaagagataggtaaattgaagtctgcctctcgaaaaaatagattgtctaaaggttatgtcacgtatgacgatttcggtcatgacggtgatgatactttacacagaccggtagtaaaccatcctattccaaatgttgtacaatcggaagaattaaactactccgatgggggctcatccgtcgatgttgttttctacagcttcattactcctaatattttatgggcattaaaggagatcggatttgaggaagacgtgagtaatcaaatcgaattttattccaagaactatttgggtctattattaaatgaatatattagaaataatgatatatag

SEQ ID NO: 68427 - protein, 639 aa, Debaryomyces hansenii CBS767
MNMIENKRKCQYGFIVLAFILGIFLFPVSWLQLSKQHKSDSSLIRNIEWNDINFIHTTDTHGWYSGHINQKQYNADWGDFISFTIHLRDIAHSKKQDFLLVDTGDRHDGNGLSDVTIPNGAKSLPIFMRQDYDLLTIGNHELYIWENSQQEYDLVRDHFKSNYISTNVEYKLQNGTYIPMGQRYKYFTTPIQSIRILSFAFLFDFARYNSETKVEPIMKVLDEDWFKDILIDHPADEVDLLVIIGHIPVSHNDEELFQLHLFLRKYYPKTKIQYFGGHSHIRDFSIYDEYLTGLQSGRFCETAGWVSINLESANNNLNGVDKVKNTFSRSYIDFNLNSFMYHTNISSTEEFHTGVGLNVSRQISDTRKELNLEAIIGYVRNSNYFMDYVSITNPKNIFKLLTDKVLPTLEIENPDIATSDQRLIIINTGSIRYDLYKGPYTLDSQYIISPFENDWVKLTLPKNVAIKIAPKLNELQYIIRSASDNTFDNRRLLPEHQYSRLLKNDYASFNKRTEDWGQHHFENRASERFQEIGKLKSASRKNRLSKGYVTYDDFGHDGDDTLHRPVVNHPIPNVVQSEELNYSDGGSSVDVVFYSFITPNILWALKEIGFEEDVSNQIEFYSKNYLGLLLNEYIRNNDI

SEQ ID NO: 68428 - DNA, 1722 bp, Yarrowia lipolytica CLIB122
  CDS (1)..(1722)
atgaaactgaatctggcagtgctggcgctggcggtgcattccgtggcctcagcagctacgggccagcagatttttgcactcaaacgtcccgacagacgtgctctgactcccggcgagtacacctttctacagaccacagacacccacggctggtttgagcagagcggtgagacctactttggcgactggggcgatctcgccagcttccaccaacacatgaagaaaaagtacccgaatttgctgttttttgactcgggagacaagcatgatggcaacggggtttcggacgcctctaccccgagaggccactattcgcgacggctgtttcgcgaaatgccctttgacgccgtcacggtcggaaaccacgagctctacaacacagaggtggccacgttggagtacgaggaggtgtcacagcatctaggagacaagtaccttagtggtaacgtggagatttggagaggcgaatggcgtccctacggtaaccgatacaaggtgatcgagcggtcgcattacaaagacggcaaaactcgtcggatcctcacttttggcttcctctatgactttgacctgcatcccaataacattcgagtcaccaaggtcagagatgccgtcaagcagcaatggtttctggacgctctggacaacgaggagtacgacgtggtggcggtgataggccacattcccctacgatcatgggaattccctcagctgattgaggccatcagaaagcgaacaaagaagcctctggtgctgctaggtggccattctcacgtcagagacgccgtccagctgaatggagagtttgacggcccctctgacgtgtacggcatccagggaggccggttcctggaaactctgggatggctgtctcttaatgtcactggtcaggagtccacctcttcgtcccggtcatatattgatttccatattgacggtctcaagttccacgcctcacatgaccccgaccattccaagtgggacaccgctttgggcaagagccttactcggcagctgagccgcatcaagaagaagctcgatctgaaagaagtgtatggatgtgtgcccgaaaactattacaccaatggcgcaaaattccccgggccgtcttctctgctcagtctcattgctgacgaggtgctcccaactctgaatggcactgccgagggagctacgggtgaccgagtgattatcaccaacaccggcggtctgcgtttcgatctgctcaagggcccctacacacgtaataccggctttgtggtgtctcctttccccaataactgggtataccttcccaatatagacattcacacggcccatgacattttgccgtacctgaaccgaaaggcgcatattttgggaagtggtcacatggtgcctgaggagatcccccaggagtgtgacatgttccatgctgcagacaccaagggcctgttgcctggatacgtgactctggacgactacgggcatgatggagatgatactcctcattgggctcttccttactacgagcttcctaatgccattcagacagagatgcctccggacgacgtcaagtatgttgatctggtcttctacgacttcattgccccctttattcaggaggcgctgtatgctcttgaccggcctgattactttgagcggctgaccgactatggaggcaagggactgaatgagctactgaaggactacgccgaggagcactgggagtgtcggtattag

SEQ ID NO: 68429 - protein, 573 aa, Yarrowia lipolytica CLIB122
MKLNLAVLALAVHSVASAATGQQIFALKRPDRRALTPGEYTFLQTTDTHGWFEQSGETYFGDWGDLASFHQHMKKKYPNLLFFDSGDKHDGNGVSDASTPRGHYSRRLFREMPFDAVTVGNHELYNTEVATLEYEEVSQHLGDKYLSGNVEIWRGEWRPYGNRYKVIERSHYKDGKTRRILTFGFLYDFDLHPNNIRVTKVRDAVKQQWFLDALDNEEYDVVAVIGHIPLRSWEFPQLIEAIRKRTKKPLVLLGGHSHVRDAVQLNGEFDGPSDVYGIQGGRFLETLGWLSLNVTGQESTSSSRSYIDFHIDGLKFHASHDPDHSKWDTALGKSLTRQLSRIKKKLDLKEVYGCVPENYYTNGAKFPGPSSLLSLIADEVLPTLNGTAEGATGDRVIITNTGGLRFDLLKGPYTRNTGFVVSPFPNNWVYLPNIDIHTAHDILPYLNRKAHILGSGHMVPEEIPQECDMFHAADTKGLLPGYVTLDDYGHDGDDTPHWALPYYELPNAIQTEMPPDDVKYVDLVFYDFIAPFIQEALYALDRPDYFERLTDYGGKGLNELLKDYAEEHWECRY

SEQ ID NO: 68430 - DNA, 1794 bp, Cryptococcus neoformans var. neoformans JEC21
  CDS (1)..(1794)
atgaggttccccctcctcctccctttcgccgctctcgagctcccggtccccaccgcccccctcgagtggaagcaagcgaacttcctcagcatctcagacagccacggctggctcctcggacaccaacattcaacatggcctgaaccgaattactcgggaaattatgggtcgttcgcatcattcgtgatccacatgcgcaaaatagcagatgagaagggcgttgacttactcctgatcgacgcaggggatcatcatgacggctcaggcctggtctcatcctcaccggactcggcatccttggcggaggacatattctcgatgatttcatacgatgtcattaccatcggaaatcatgagctataccattatgcggacgccctcgatatctatgagaaccacgagcgatggggtggaaggtacgttacttccaatgtaaatattacggtcaagcgggaaggggaatggcaatctgtccctattggacagacgcacctaaaattcacgacgaaacagggctataatgtcactgcctttggtgtaatatttgatttcaaggcgcatgacaagggtataacggtccagaaacctagtaagcttgtgcatgaaccttggttccaggaagccattcgcgatgctccggactattttatcctcgctggtcatatgccggtacgaggagaaaccgcggagtttgcacctgtgtttgatgctatccgcgatatccatccacaagtccctattttcttatttggagggcatacacatgttcgggattgtgtccaatatgacgaacgctctatcggagttgtcccggggaagtatcttgaaacagtggctttcacatcgtcatcattaccttcttcttcgggcgatgataggcctctagacgtggctaggagctatcaatggcatacaaatcaaacatcttatacttttgatacggaacaagggctgcatatctctctcacgcttcagcatctagcctcctctttgaacatcactgatcctcttggtgtttctcctcacgactattatctcgctcgtcatccttggggtcatccacgctctgtactgacccttttctcagacaaagttttacccaaaacagttgtcgaccatgaacgagggaaaggggagcaaggcaaggagaggatcatcatcggcaatgccgggagtttgaggtttgatttgttccagggggttttcgatagaaacgacgaacttactgtttcccctttcacgtcttcatttttatatactcgtctaccggcttcactagctcgaaacatcacggatcagatgaaccgcgctggtgcatcaaaattgatgtcaaagtcacctgtgacaccttacgaggaggagcagcgtgtgaaaaggattcacgacaggtggttgtatgaacagtggcaagcttatgagctcgaaaacgcatacgaaggcgacactcaaaaggtgatggtcgacaaagggaaagacaagcctagaactttgggacatgtcaccaaggacaaatgtcctggtactggcgatgatatcgcgcacatccctgttccattttatagtgaccagccggattttatatcttcccccttcccttcagttgcggaagacgaagaaattgatgttgtttgcatggactttgcattggatgatttcctcactgccgtcaacacccttgacccaacacttaatttaaatgagagtgagatgaagccgtatgctaaagggctacgtatcaattctgtcttcgggaaatacgcccagagatactggggagctggaactcaagagtga

SEQ ID NO: 68431 - protein, 597 aa, Cryptococcus neoformans var. neoformans JEC21
MRFPLLLPFAALELPVPTAPLEWKQANFLSISDSHGWLLGHQHSTWPEPNYSGNYGSFASFVIHMRKIADEKGVDLLLIDAGDHHDGSGLVSSSPDSASLAEDIFSMISYDVITIGNHELYHYADALDIYENHERWGGRYVTSNVNITVKREGEWQSVPIGQTHLKFTTKQGYNVTAFGVIFDFKAHDKGITVQKPSKLVHEPWFQEAIRDAPDYFILAGHMPVRGETAEFAPVFDAIRDIHPQVPIFLFGGHTHVRDCVQYDERSIGVVPGKYLETVAFTSSSLPSSSGDDRPLDVARSYQWHTNQTSYTFDTEQGLHISLTLQHLASSLNITDPLGVSPHDYYLARHPWGHPRSVLTLFSDKVLPKTVVDHERGKGEQGKERIIIGNAGSLRFDLFQGVFDRNDELTVSPFTSSFLYTRLPASLARNITDQMNRAGASKLMSKSPVTPYEEEQRVKRIHDRWLYEQWQAYELENAYEGDTQKVMVDKGKDKPRTLGHVTKDKCPGTGDDIAHIPVPFYSDQPDFISSPFPSVAEDEEIDVVCMDFALDDFLTAVNTLDPTLNLNESEMKPYAKGLRINSVFGKYAQRYWGAGTQE

SEQ ID NO: 68432 - DNA, 1743 bp, Aspergillus nidulans FGSC A4
  CDS (1)..(1743)
atggcttcctatctcaaccctctcgttatcttatctttggtctcggcggttcaagctgttcagccctccgctccggattttgtcgcagctcctttacgtgaactgaaatggggtcaaatcaacttccttcatacgacagatactcatggctggctggctggccatctctcagagtatgagtatcagtcgttgcttggtgatagagtagagggcaatggcctttacgattcgtcagaccctaaaggtatatatacttccgagattatacggcaacaacaaatcgacgtgttgtctcccggaaatcatgagctctacaaaaagagcacctcagaagccgaatatagaattactgtacctaacttccgcggtcactatttgtcgtccaacgtcgatatctatgaccctgaaacaggagaactcgtggagttgggtccccgatttaggaaattcaccacgaagaaccaaggcattcgcatcactgcctttggctttcttttcgactttacaaggaactataacaacacggttgtccatccggtggaggaagttgtgaaagagccttggttcaagcacgccattcaagaccaggccgtcgatctgtttttggtgatagggcatgttccagttcggtcaaaagagtacgacgcggtcttcaatgaaatcagagctagtcatccggacacgccaattcagtttttcggtggtcacctccacattcgcgattgtcatcaattcgactcgaaagctgttgggcttgccagtggccgatttatggaaactattgggtttgcgtcaattagcggactgtctacggagcgcaacaaattggagcccagcatggtagatcctatcttcgagcgaagtcacactggtcttaatgagagtacgtttccaacggagcacggccgcaatgtgtctcgtcttatccagcaatcacgaagtgcgctgaaactagacgaaatatacggctgcgtcccggagaccttgtggatgtcacgatctccgcatacagcctcaaataacatttacgcttggttgcagagggaggtacttccaagcatgctagacgacacatctcggaaagggaaaccagctttcgttatcttcaatactggcgccattcggtttgaccttttcaaggggcaattcaatcgggactcagtctatataatttcgccatttacaagtggctttcgttacctgaaggacattgcctatgccgaagcagagcaggttttgaatgtcctaaatcagcagccacaaatcttcacaggcgccgaagggacaaccgggcttctgctacgggctcttgcgccgccagagcaagctgctcgtgactacggaattgacctcgctcgactacatcgtgcagagtcgattctcaatattcccacaagtcagcatccgatgtcagttggccacgattctgagcatgagatcatacctggatatactacgacagatgatctaggtgcagatggtgatgatacagtccattccatgattgaattctatcagataccgaactgcataggtgccttgactcttgacggtggctctgctccgccagaaactgtggaccttgtgtacatcgatttcatacagccatatgtgagcttcgcggctgaccaagttgggctcggtgtcaatgtctctcaggacagtgaggtgtatatgccctctacttcatttacggatctccttgtacagtgggttaagactcactggggctgctcggtgtga

SEQ ID NO: 68433 - protein, 580 aa, Aspergillus nidulans FGSC A4
MASYLNPLVILSLVSAVQAVQPSAPDFVAAPLRELKWGQINFLHTTDTHGWLAGHLSEYEYQSLLGDRVEGNGLYDSSDPKGIYTSEIIRQQQIDVLSPGNHELYKKSTSEAEYRITVPNFRGHYLSSNVDIYDPETGELVELGPRFRKFTTKNQGIRITAFGFLFDFTRNYNNTVVHPVEEVVKEPWFKHAIQDQAVDLFLVIGHVPVRSKEYDAVFNEIRASHPDTPIQFFGGHLHIRDCHQFDSKAVGLASGRFMETIGFASISGLSTERNKLEPSMVDPIFERSHTGLNESTFPTEHGRNVSRLIQQSRSALKLDEIYGCVPETLWMSRSPHTASNNIYAWLQREVLPSMLDDTSRKGKPAFVIFNTGAIRFDLFKGQFNRDSVYIISPFTSGFRYLKDIAYAEAEQVLNVLNQQPQIFTGAEGTTGLLLRALAPPEQAARDYGIDLARLHRAESILNIPTSQHPMSVGHDSEHEIIPGYTTTDDLGADGDDTVHSMIEFYQIPNCIGALTLDGGSAPPETVDLVYIDFIQPYVSFAADQVGLGVNVSQDSEVYMPSTSFTDLLVQWVKTHWGCSV

SEQ ID NO: 68434 - DNA, 1689 bp, Candida albicans SC5314
  CDS (1)..(1689): transl_table=12
atgttgttaattcttgctgtggttttgtttagtggctgttatgcgtcatttccacatcgtaacttgacatggaacgatataaattttgttcataccaccgatacccacggttggtactctggacacatcaaccaacctctttaccatgccaattggggagatttcatttcgtttactacacacttgcggagaattgcccatagccggaaccaagatcttttacttatagacagcggtgatcgccacgatggtaatggcctatcagatatcaccagccccaatggcctaaaatcaacccctattttcatcaaacaagactatgatttgctaactatcggaaaccacgagttgtatctttgggaaaactcaaaacaggaatacgaaactgtggttaaccattttcaggataagtatgtttgttcaaatgtggatatcagactagacaatggcctgtttgttcccttggggctgaagtacaagtattttacaacaccgattagagggattagagttttggcttttgggtttttattcgatttcaagaggtttaatagtggtactagagtgacgccaatggcagaaaccatacacgagccgtggtttcaggaggcattaaaacatgaagtcgatttgattataattgtgggtcacacacccatttcccataactggggagagttttaccaggttcaccaatacttgcgtcagtttttccctgatacgataattcagtattttggtggacacagtcatattcgagactttaccgtgtttgacagtttgtctacaggattacagagcggaagatattgtgagaccgttggctggacaagtgttaatttagataaagcggatctaaaccttcctgttagacaaagattttcgagatcgtatattgatttcaataccgactcatttaagtaccacaccaatttagataaagagtttgataccgccaaggggaaactggtttccaagttgattcgagaaacacgcaaagagctcaagttagataccttgataggctatgtcaagacaaactattatgttgattacgttcccatcgatcaccccaaaagcattttcaatttgttggctctgaaaattctcaaaacattaccgaaatccaaacatgaagagcgaattacaattatcaatactggctcaatcaggtacgacttgtacaaggggccatatactattgactccaaatttattgtctcgccctttgaaaacatatgggtcaatattacagtgccaaaatcagttgccactaaagtagcagcaaaactaaatgacgccgactatatcagtgcctctcgattgaaaccacctcatcaatacgatttgcaagtccaggacttgagtacttccccccaccaagctcactttgagatgcaggaaaaactccccaaaggttatgtcactcatgatgactttggggctgatggcgacgatacgttgcatcgtgccgtagttaatttcccagtacccaatgttattcagagtgtggaaatcaacgatgaggtagattcgcctgtcaaccttgtgttttatagttttatcacgccaaatatcatctgggcattaaaagagttgaatttctctactgaacaagtaccaacaccatattctgacatttacttaggtacattgctaaacgaatttgttgccaacaataagatctaa

SEQ ID NO: 68435 - protein, 562 aa, Candida albicans SC5314
MLLILAVVLFSGCYASFPHRNLTWNDINFVHTTDTHGWYSGHINQPLYHANWGDFISFTTHLRRIAHSRNQDLLLIDSGDRHDGNGLSDITSPNGLKSTPIFIKQDYDLLTIGNHELYLWENSKQEYETVVNHFQDKYVCSNVDIRLDNGSFVPLGSKYKYFTTPIRGIRVLAFGFLFDFKRFNSGTRVTPMAETIHEPWFQEALKHEVDLIIIVGHTPISHNWGEFYQVHQYLRQFFPDTIIQYFGGHSHIRDFTVFDSLSTGLQSGRYCETVGWTSVNLDKADLNLPVRQRFSRSYIDFNTDSFKYHTNLDKEFDTAKGKSVSKLIRETRKELKLDTLIGYVKTNYYVDYVPIDHPKSIFNLLASKILKTLPKSKHEERITIINTGSIRYDLYKGPYTIDSKFIVSPFENIWVNITVPKSVATKVAAKLNDADYISASRLKPPHQYDLQVQDLSTSPHQAHFEMQEKLPKGYVTHDDFGADGDDTLHRAVVNFPVPNVIQSVEINDEVDSPVNLVFYSFITPNIIWALKELNFSTEQVPTPYSDIYLGTLLNEFVANNKI

SEQ ID NO: 68436 - DNA, 2001 bp, Aspergillus fumigatus Af293
  CDS (1)..(2001)
atgatgcggtctcacactgcgctttccattgcagcgctgctggcacttgccagagtgccgtgcactgtgttcggcgacaacattatttatcctcaacaacaaaaagaagcattcaacgcaactgaaataccccgagctcctctcccctgggggagggtcaactttctgcacacaacggatactcatggatggcttgatgggcacgcaaatgtacccagctggggtgctgactggggcgacttcgtttcctttgtcatgcacatgaaagataaagccttacgcaagaaggtagatcttcttcttatcgagagtggagacttccatgacggtggcggcctcagcgacagtacaagccccaaaggagctgtgtcagacagtatctttgagaacattgattacgatctcgtgactattggtaaccacggcgttcgaacctgggcagaagcattaaacatccattacaacctatcgcgagtctttggtgatcggtttctcaccagtaacgtcgacgtagaagaagataaaaaacttaaatcaattggcaatcgatatcgcgcttttcagaccagaaacgggctacggatcgtggcctttggagtcactgtcaatgaccctatcctcagggatctaaaccatacagaggttcacaatgcgagctggatatttgaacaggaatggtttgcggaagccatgaagaaagaggctgacctctacgtgattgttggtcatatccctacctacgcttcctgcctggatcctacaaaggataatcctatggtgtgtctgcgcgataggatcaggaattccacagataagcccatccagctcttcgggggccacgcccatcatcgaaacttcacgtgttatgacgacagatcctcgggtattgaatctggcaagtattgcgataccgtgggatgggtggccttgaacaacgtgttgtcgcctacatggtctggtacgaaggagctgctgggtgacgatctccatccaaacaaatcctgcgccgtaggaagacaaggagatacacacgacgccccttatcttctagatcgccgatacctggactggaaccgtgtaacatttgcgtaccatacggtaaacctggaaggaaacaccgacaacccgtccgtgccagcatcctttgatatgcccctgggccgcaaggtcaccgatgatatcagcaaagcccgacagttactcaacctgacccatttcctagggtgcgcaaaagaagaatactgcttcaattgcaagaaagtgggacaggacggcaatatctatgagctcctaaaggttgccctcgctgatacggttgttaacaaggagcgggcacaccttgcacgggttgtgatttccaacgacgggacaatccgggataatatttaccaaggcccttttacgacaggggacgcctatgctgtcgtgccctttccgaatcatttcctgtatatcgcgaatatgccgtgtcatcatttcaaaaagatgacttcaagtttgcaggcaaagcaaaacgtttcctgcattgatgacgacgactatgatgaaccctacgtgattaaaaaagagggtcatagatcccagtatcaggcacacctggagctccggaacatatttgactatcatagtgatcatcaggctagggaacggaaagaatacagcccagggtacacaacgcacgatgccttaggcaacgacggagacgacacccttcactctcctgttatcgaggacgaaagatacatgaaactgttctgggcaaatgccagcttcccgaacctgcctcagtacccgccttcatttgatgtagttttcaccgactaccttgcgccgagaatcctcggcgctcttaagagaataggagctccctatacgcagaaagatgtcattgattacctgccgcggacttatactagtagggatgtccttgttgattatactgcgaggaattgggaccaggatagggacaactgtcatatccagaagccgggtgatcgttag

SEQ ID NO: 68437 - protein, 666 aa, Aspergillus fumigatus Af293
MMRSHTALSIAALLALARVPCTVFGDNIIYPQQQKEAFNATEIPRAPLPWGRVNFLHTTDTHGWLDGHANVPSWGADWGDFVSFVMHMKDKALRKKVDLLLIESGDFHDGGGLSDSTSPKGAVSDSIFENIDYDLVTIGNHGVRTWAEALNIHYNLSRVFGDRFLTSNVDVEEDKKLKSIGNRYRAFQTRNGLRIVAFGVTVNDPILRDLNHTEVHNASWIFEQEWFAEAMKKEADLYVIVGHIPTYASCLDPTKDNPMVCLRDRIRNSTDKPIQLFGGHAHHRNFTCYDDRSSGIESGKYCDTVGWVALNNVLSPTWSGTKELLGDDLHPNKSCAVGRQGDTHDAPYLLDRRYLDWNRVTFAYHTVNLEGNTDNPSVPASFDMPLGRKVTDDISKARQLLNLTHFLGCAKEEYCFNCKKVGQDGNIYELLKVALADTVVNKERAHLARVVISNDGTIRDNIYQGPFTTGDAYAVVPFPNHFLYIANMPCHHFKKMTSSLQAKQNVSCIDDDDYDEPYVIKKEGHRSQYQAHLELRNIFDYHSDHQARERKEYSPGYTTHDALGNDGDDTLHSPVIEDERYMKLFWANASFPNLPQYPPSFDVVFTDYLAPRILGALKRIGAPYTQKDVIDYLPRTYTSRDVLVDYTARNWDQDRDNCHIQKPGDR

SEQ ID NO: 68438 - DNA, 1881 bp, Aspergillus fumigatus Af293
  CDS (1)..(1881)
atggtgtggaacattgctctgaccaggatgaagtaccttgcttactgggctcttctctattcatcttcacccggcctagctattcagccgtcagctccagatgctataccggcgcccattcgcgatctccaatggggtcagctgaatttcctccacactacagacacccacggctggctggctggtcatctacaggaatcgaaaagggcttcctatggagcagactggggagattatatctctttcaccacccgcatgcgggaaaaggcactcgctcagggcaatgatctgctgataattgacactggtgacagggttgaagggaacggtctttacgacgcttcggaacccaagggcgcctacatttccgacattctgcgtcaacagcagattgatttgatgtcagccggcaatcatgaactgtacaagcagaacacctcggagactgagtttttgactactgtgcccaattttcgtgatagctacctggcgtccaacattgacatcgtccatccaatttccggagagctcgtgccgttggctccacggtttaaaaagttcacaactgagaaacaaggcatccgcatcgtcgcttttggttttctgtttgatttctccaaaaattacaacaacacaatcgtttatacagtggaggatacaattaaaacgacttggttccaagaagccattcgtgacgaagaagtcgatcttttcctggtgatcggccatgttccagttcgctcgaaggaatacaatgctgttttcgaagagatcagaaacgttaattgggatgtgccaattcaatttttcggcggccattatcatatccgcgactatgctcggtacgattctaaagcgtacgggctggcgagcggccgcttcatggagaccattgggtttttgtcaatcgacggtctgtccactagtaagaatcggctcaagcctgctcaagcaactcccagcttcaaccgacggtacattgataacaacctctactcgtttcaccatcacactggtcatgatcgggattcttttcccacagagcacggtcaaaatatatcgcatcttattcagcagtccagggatgtccttgaactggatagggtgcacggttgcgctcctcgggacctctggatgacccgagtaaagtatccctctcaggacagtatatatacgtggctcgaggagaaagtgcttcctagtcaagtgaaggatgactctcgcaaagggaagcccgcgttggtcattgtcaacactggagccatacgcttcgacatatttaagggtccgtttacacaagatacgacattcattgtctcgccctttacgagcggcttccggtatatcaaggacatcccctacgacaaagcgcaaacggtagtagacattttgaacaagcagccgcaaattttgactgcgcccaaggaccacacaaaccacacaccatggactcttgcgccacctgagcaatcaatgcatatgcacgataagattgtggaaagcgacgatgtggctgcccattatcttactgatcagagtcggcttccaatgagcacaccattcacgcctaaggttttccctggctacaccactgtagatgatgggggtatagatggtgatgacactgttcattcgccaatatcattctaccgtgttccaaattgcattcaagctctcatcaatccagggacgtctgccgatccgaacacagtggatcttgtgtatattgactttatcgagccctacgtggcgctggccgccaaatttgcgagacttgatctcgattttgcacgggatagtgacgtctatatgcccttcgagactttaactgatcttatcttggactgggtcaaacataactggaaatgcgaagatgcatga

SEQ ID NO: 68439 - protein, 626 aa, Aspergillus fumigatus Af293
MVWNIALTRMKYLAYWALLYSSSPGLAIQPSAPDAIPAPIRDLQWGQLNFLHTTDTHGWLAGHLQESKRASYGADWGDYISFTTRMREKALAQGNDLLIIDTGDRVEGNGLYDASEPKGAYISDILRQQQIDLMSAGNHELYKQNTSETEFLTTVPNFRDSYLASNIDIVHPISGELVPLAPRFKKFTTEKQGIRIVAFGFLFDFSKNYNNTIVYTVEDTIKTTWFQEAIRDEEVDLFLVIGHVPVRSKEYNAVFEEIRNVNWDVPIQFFGGHYHIRDYARYDSKAYGLASGRFMETIGFLSIDGLSTSKNRLKPAQATPSFNRRYIDNNLYSFHHHTGHDRDSFPTEHGQNISHLIQQSRDVLELDRVHGCAPRDLWMTRVKYPSQDSIYTWLEEKVLPSQVKDDSRKGKPALVIVNTGAIRFDIFKGPFTQDTTFIVSPFTSGFRYIKDIPYDKAQTVVDILNKQPQILTAPKDHTNHTPWTLAPPEQSMHMHDKIVESDDVAAHYLTDQSRLPMSTPFTPKVFPGYTTVDDGGIDGDDTVHSPISFYRVPNCIQALINPGTSADPNTVDLVYIDFIEPYVALAAKFARLDLDFARDSDVYMPFETLTDLILDWVKHNWKCEDA

SEQ ID NO: 68440 - DNA, 2385 bp, Ustilago maydis 521
  CDS (1)..(2385)
atgatggcacctcactccaacaccgccgtccagccatggccatcttccagtacccgaggctacagaggtcggccagcaagacatctgcttgtgaccttgatcgcactcgcctctctctgttcgactctggcgagctcgccagttgagccattatcgagtaaactcgctttcaaccatcgtatcgatgcagacgccgattcgctcgccaactaccgcgccgagatggaaggcttccagcgctggagtcgagaaagaggtcgcatgcccaggtccgatgacaagttgcgcgagctcgaatggggcgacctcaatcttctccattcaaccgatatacacggctggtttgctggccatcgcaaactctcgccaccagagccgtcgtattctggcgactggggtgactgggcatctttcgcgtccaagatgaggtccaaggctcgccatgagggtcgagatctcttgctcatcgacactggtgatctgcacgatggcaacggactctcggacggctttccaccttacaataaggacgaacctggcggcaaggaagccgtcgacggccatgtcagcaaccagatttttgctatggtcgactacgatttgcttacgatcggcaaccacgagctctacaattacacagtagcaaaggatgtctatcagaattttgtgccacagtggggcggaagatatatgaccagcaacgtcaagattgcgctccccagccctgatgctccttacgcaagctacgcgcctatcggatcgctcttcaacacgttggtgacgccggtgcaagggctcaagatcatgtcgtacggcatcctgttcgactttaagcttgctgccaagggaatcgccgtacaatcgccagaggacatggtggaagaagactggttccaacagagcctggatcgagctgaaaagtggggcgttgacgcctttgtcatactgggccacatgcccgtatcgggtgaccctggctgggaggctgttcgcaccaggattcgctcacgctttcccgatacacctatcgccatccttggaggacacacgcatgttcgcgactgcagaatgatggacagtcaaactatggctctcgaaagcggacgatacatggaaacaattggttttatgggcatcaaggaccttcagaagcgcaaacgtgcaggcaatcgcggcaaagtcaagtttacacggcggtacattgattcgaaccccagaaattttgcgcatcacttgaagctggagagaacacaggagctggcaaccaagaagggcagcttcattcggttcatcatggatgccatctccgaagcgtggaatctttcgcgcttgcacggcgtagtgcctcaggactactacctggaccgcgttccatacggcgacaattcgagcttgttaagtctcttggcggatcaggtgctacccaaggtcgtgcggccgtcggaaagaggtcgacaagacaagaagagtctggtgctgatcaacagcggctcacagcggtttgacgtctactcgggcccttttacacgtaatgaccaatacattgtctcgccgttcaaggatcgcttcctgtacatggccgatgtcccttggggcactgccaagcacctgcttgacggattgctcagcttcaagaaaggcgccatggttgaggtgatgcagggcggaactcagtactcggacggcgatgcggtgctgcgatacggaagtggttttgtggaggacattttcgtacgctggcaaaagtcgcaatggttcaaatttttgcaagcagagcacgctgatcgacaaaaagcagctgcagctgccgctgccgctgccgacggcggatgggtaaacgatatgaataccaccatcaagagcgtagaagagctcgaggcggaagaagatgaagagctgctcaagttcttccacaagtacgactcgctcgataagccgtctttggggtatcgcaccatcgatcaatgtgctggaccgggcgatgatacggtccattcgcccgtaccgtttaacccgcaccagccagagtacgttgcttcgaacccagatccactgccagagtctgacgaggaggtggtcgacgtcgtgtttgtcgactttatgcgcaaactcatggtggagctcctcaaccggtacgatgtggagcgcaatggaacgcggtcataccatgtggatcagcttgagcgatggggagacattaccacgcagcttttgtatccgcgattcgccgagctcgaatggcagcctggcgaaggtgcagtcaaggcgatcaacgcacatgcgaggagggcgggcaagatgggctacgcacctttggctgacgaacccgattacgatcatgaagagcaacagcagcacatctcgatccccaatgactcacgatga

SEQ ID NO: 68441 - protein, 794 aa, Ustilago maydis 521
MMAPHSNTAVQPWPSSSTRGYRGRPARHLLVTLIALASLCSTLASSPVEPLSSKLAFNHRIDADADSLANYRAEMEGFQRWSRERGRMPRSDDKLRELEWGDLNLLHSTDIHGWFAGHRKLSPPEPSYSGDWGDWASFASKMRSKARHEGRDLLLIDTGDLHDGNGLSDGFPPYNKDEPGGKEAVDGHVSNQIFAMVDYDLLTIGNHELYNYTVAKDVYQNFVPQWGGRYMTSNVKIALPSPDAPYASYAPIGSLFNTLVTPVQGLKIMSYGILFDFKLAAKGIAVQSPEDMVEEDWFQQSLDRAEKWGVDAFVILGHMPVSGDPGWEAVRTRIRSRFPDTPIAILGGHTHVRDCRMMDSQTMALESGRYMETIGFMGIKDLQKRKRAGNRGKVKFTRRYIDSNPRNFAHHLKLERTQELATKKGSFIRFIMDAISEAWNLSRLHGVVPQDYYLDRVPYGDNSSLLSLLADQVLPKVVRPSERGRQDKKSLVLINSGSQRFDVYSGPFTRNDQYIVSPFKDRFLYMADVPWGTAKHLLDGLLSFKKGAMVEVMQGGTQYSDGDAVLRYGSGFVEDIFVRWQKSQWFKFLQAEHADRQKAAAAAAAAADGGWVNDMNTTIKSVEELEAEEDEELLKFFHKYDSLDKPSLGYRTIDQCAGPGDDTVHSPVPFNPHQPEYVASNPDPLPESDEEVVDVVFVDFMRKLMVELLNRYDVERNGTRSYHVDQLERWGDITTQLLYPRFAELEWQPGEGAVKAINAHARRAGKMGYAPLADEPDYDHEEQQQHISIPNDSR

SEQ ID NO: 68442 - DNA, 1932 bp, Ustilago maydis 521
  CDS (1)..(1932)
atgttgttgagccgcttcatcaccacggccatcgcgctcgccggtgcggtttcggcttgtcccggaatcgaccatgcccaaggccttgctcctcggaaagttgatcactccattcagcccagtggaggcaacagtctgctccgtgaactgacttggggcgatctggccgtaattgcgacaactgacatccacggctggtatatgggtcacatgaagaagagttatccggagcctaactattccggcgattggggcgactttgcgtcctttgtcaagcacatgcgcaagcttgccaagaagaagggtgtcgatctgctccttgtcgactctggtgaccttcacgacggtgctggtttgagtgacggtttccctgcaggccaggtcgacggccaagtctctaaccaattccatgccaaggtcaagtacgatctcttgaccgtcggcaaccacgagctgtacaagtacaatgttgcctggaacacgctgcaagaatttgtgcctgaagctcgcagtcgttacctgggctccaacgtcaacatcagtcatgctgcgccccgcggtggcaacaacgtctcatacacctatggcgaacggtttgtcaagttcaagaccgaccatggccgaaaggtcacctcgctcggcgtcctcttcaactttaccggtgccgacagcggcattaccgtccaagaccctgctcagatggttctcgagccctggttcatcgacgccatccaggagcagcctgatgtcttcctgatcgctggccacatgcccgtccgcaaggatcaatttcccgtcgtggttaatgcgatccgcaaagtgcacccgatcacaccgatcatgatcctcggcggccactcgcacattcgcgactgcacccagtacgacaagtactctatgggtatcgagtcgggccgatacctcgagacgatcggctggatgtcgatgaactttaccaacaacggtcccaccttcagccgcacctatatcgacgccaaccgacgcaattacgccttccacgcaggtctcgctgccaagcctgaaaagttcgacacggccctgggaaggaagatcaccaagcagatgaaccaagtcgccgatgcctggaatctctctcacgtttatggtgttgctccccaggattactacctccagcgtgtccccatcaacgacagctcatctctgatcaactttatgaccaacaaggtgctgcccaccgtcatctcgacctcgaatccggaacgcaaaggggtgcccaacattgtcatcgccaacacgggctcgcagcgattcgacctgtatgcaggtcctttcaccaagaacgaccagtacattgtctcgcccttcaccgacgctttccagtatattaaggatgtgccgtacaagtacgctagccaggtcattcacaagctcaacggtgacagggtcgctcaggctaccagccgtaggcgcgatctcgaaggcgctgagagcgaacaggagctctacgctaagggacacgtctctcacatctacaaccgctggatccaggatcagcacgtttttgcttcggctcacaacgcggcagctcgtgacctggccatattggacgctcgagcagctgaagctcaagcgaaccgcacgctcggctacgtcaccaaggaccaatgtccaggggatggagacgacaccgtgcacagcgctattcccttcgcttcggttcccgactacgttcagagccctgtcaccggtcagaacgtaagcgacacggacaaggtcgacgtcatcttcctcgactttatcgccaagaacgtcgtgagaattctcaacagcgtccaaactgaaacgacgtactcgctgagcgatgtcgctgcttacaaccagtacactacgcaggacatctacccgctttacgctgaacagatctgggccaacaactctacctctgcctga

SEQ ID NO: 68443 - protein, 643 aa, Ustilago maydis 521
MLLSRFITTAIALAGAVSACPGIDHAQGLAPRKVDHSIQPSGGNSLLRELTWGDLAVIATTDIHGWYMGHMKKSYPEPNYSGDWGDFASFVKHMRKLAKKKGVDLLLVDSGDLHDGAGLSDGFPAGQVDGQVSNQFHAKVKYDLLTVGNHELYKYNVAWNTLQEFVPEARSRYLGSNVNISHAAPRGGNNVSYTYGERFVKFKTDHGRKVTSLGVLFNFTGADSGITVQDPAQMVLEPWFIDAIQEQPDVFLIAGHMPVRKDQFPVVVNAIRKVHPITPIMILGGHSHIRDCTQYDKYSMGIESGRYLETIGWMSMNFTNNGPTFSRTYIDANRRNYAFHAGLAAKPEKFDTALGRKITKQMNQVADAWNLSHVYGVAPQDYYLQRVPINDSSSLINFMTNKVLPTVISTSNPERKGVPNIVIANTGSQRFDLYAGPFTKNDQYIVSPFTDAFQYIKDVPYKYASQVIHKLNGDRVAQATSRRRDLEGAESEQELYAKGHVSHIYNRWIQDQHVFASAHNAAARDLAILDARAAEAQANRTLGYVTKDQCPGDGDDTVHSAIPFASVPDYVQSPVTGQNVSDTDKVDVIFLDFIAKNVVRILNSVQTETTYSLSDVAAYNQYTTQDIYPLYAEQIWANNSTSA

SEQ ID NO: 68444 - DNA, 1806 bp, Giardia lamblia ATCC 50803
  CDS (1)..(1806)
atggtgctggccgttctggctcttgccctgcttttcgcaagcaccgcagaggcccagaatctggcccttgacgttatctcagtctccgatacacatgggtggatttatggccacagacaccagaaggagctaggagactacggaacccttgtgtcttacatcgaacgcaccagggacgaggcagccaaggatcctgcgcgtgccgtgctggccatagatggcggcgacctcattgaaggtacgggcctcagcgacgcaacgcccattaaaggcatgtacatataccaagccgccagtgaggtaggcttcgacctcataacagtcggcaatcacgatctggggtcagaatccagtaccgcatacatccatgagaagattgatgacatgttcggggacgcctatgtctcaactaataccttcatgaacgcagacaattctccattggtgaagaaccgctacaagcacatgacactgaagaatgggctcaacgtccttatgttcgggtttctgtatcgcagtagctacgtatcatcgtacgttgagcgagccagtgatatcatcaagaccgctgagattcaggcgatcctggacaagtactttgacaagacagacgtcctcgtggtggccaatcacatgagctattcagatggtgagctggagaacatcgtgaatgcatttcgctcatactatggcggaaggggatatactattccaataattcttatcgctgcacacagccatcgcttatataacgacgcctgtgcatttgaccagaccggccagtgctttattgtggaggccgagtgctacttaaagcgcattcagcacatcaagtatagcttcacccccatacaatacatggatacgaaaactagggctacaagaacaggctatcagatggccgtcccacccactgtccttactccttcaaagaacataccaaaaacaatggcagacagatttggcttagccgtggatcaatttgacacaccaaaggcaatagccctacgggaaaagatacatggctgggttgacagcctcgaccttaaccgtgtgctcggctgcagcaactatttatactccaagtctgttgggatggagtccccgacgtctgtgttcaatatttggctcaatgctgtcgttccagcagagatttataatgatgaccgcctgtctaagtgcacgcagtttccagtgacagggagctcgtccgtcagagactccatctacaaaggagagttcgtcgtcgacgactcctataacgtgatgccctttaagaattcatttgtgtatatcgcaaatctcaccgcagaagaggtggcctgtgcattttccggttccatcctgacatacaccgaagaggaacagctacagaacatttacacttacgaggctgctcgcgccagcatcccgcgttatgttaccccgatggatccctcgtctctcccatctgacagttgctatgacttaattctcacttcgtacgatgctgacaagtttgcaggccgttttagaaagggagggagctgctatagtatggttgacccatctaaatcgtatcttgcggtggactaccctactcagccgaggccaaatgttacaacagaggagctacttccagacttcttttccaaatatatgccctgctatacatcccaatctgtcgatggggtatcaggccaagaagctgctacaaccaggagcaccatgcgcatcgtattcttctctctcagcttcatagtacttgctgcagttgttgctgcactaattggacttattctcttctgctgccgcagaaagtcatga

SEQ ID NO: 68445 - protein, 601 aa, Giardia lamblia ATCC 50803
MVLAVLALALLFASTAEAQNLALDVISVSDTHGWIYGHRHQKELGDYGTLVSYIERTRDEAAKDPARAVLAIDGGDLIEGTGLSDATPIKGMYIYQAASEVGFDLITVGNHDLGSESSTAYIHEKIDDMFGDAYVSTNTFMNADNSPLVKNRYKHMTLKNGLNVLMFGFLYRSSYVSSYVERASDIIKTAEIQAILDKYFDKTDVLVVANHMSYSDGELENIVNAFRSYYGGRGYTIPIILIAAHSHRLYNDACAFDQTGQCFIVEAECYLKRIQHIKYSFTPIQYMDTKTRATRTGYQMAVPPTVLTPSKNIPKTMADRFGLAVDQFDTPKAIALREKIHGWVDSLDLNRVLGCSNYLYSKSVGMESPTSVFNIWLNAVVPAEIYNDDRLSKCTQFPVTGSSSVRDSIYKGEFVVDDSYNVMPFKNSFVYIANLTAEEVACAFSGSILTYTEEEQLQNIYTYEAARASIPRYVTPMDPSSLPSDSCYDLILTSYDADKFAGRFRKGGSCYSMVDPSKSYLAVDYPTQPRPNVTTEELLPDFFSKYMPCYTSQSVDGVSGQEAATTRSTMRIVFFSLSFIVLAAVVAALIGLILFCCRRKS

SEQ ID NO: 68446 - DNA, 1905 bp, Giardia lamblia ATCC 50803
  CDS (1)..(1905)
atgatattggcactactgcacacgctgttattactcatcagatcagcgtatcttagtacagagtcaaaaattgtcctcgacgttatctctgtgtcagacactcacggctggatttacggccacagacatctaccagaatatggagattatggcacgcttctttcttacatagagcgcacaagacaaaaagctttggagtccgaaggtcgatctgtgttagcagtagatgcgggggatctggtagagggaacagggcttagtgatctcacaaaagttaagggagaaaagatactggaggcggcatcctatattggcttcgacctacagacgatagggaaccacgaatcatactataaggagacaacagattacatacacagcaaggttgaagccctcttcggtgacagatatataaccaccaatgtttttatgcgcgatacgaacgtgccagtcggaagcggaagatataagtatctcgttcttcctactggactccgggttctcatgcttggctttctattccacaccagcccatatgacggggtctacactatccctgcgagggaggccattgcatcccaggagatcaccggtgtccttgagaagtataagtaccaaacggatctgctagtcctcgcatgtcatataccgacatatgacctggagatatccgaaatagttacagaactgcgtgcgttttataaccaaatcaattataccattccgataataattattgccggtcactaccaccaaattaagaacacgtattgcatggacggtcaggacaagcagtgctacattgtcgagggtgggtgttatctgcgctttatgcagcacgttacctatgagttcaagcccatgacttatagccatgaagggaatacgtatacaggataccagttttcctccgtagactactctttaccctacaactttacgtccgagagtttggcaaagagattcaaccttactacggaaacgttcatgactgagaacggggccatcctctcgaataagattgccgggtgggtggcagatctaaacctgacagcctttattggctataacaagcactactacagcatgttcaagaacgctacagatcaagattctatctttaacctgtggctcaatggagcaattcctgcggtgttctatcctacaaggtctactccgtgcctcccttttccaacgatttcttctgggacggccaggtatgatttttttcctgggaacgtcactagagatgattgcattgcaatccagccctcttggcaaaccatgtcgacgattcgtgggctaacagccaacctgattgcgtgtctcttttcagtgaagaatgggcttgcagaaaccatgtatccccttccagaaggtctatttgattgggaggacccccaccttatcaattaccagacaactttggacccttttaccttaaacccaaataagtgctacgacttgctaacgaccataaaaagcgcagagagctttcttgctctgttacaggaaggaggagcttgctatgaagagggatccggtccatactctgtttctccctactatgatcagaatggacaagaggttaatgcaatcgacgttcttctcaagtacgtcgagatgtacatgccgaatttggatgtcgtctctccttatattctgacccacgatctccatcaagcagacaaagactttatgatgatgatggggacaatatccttcgcaatatatattacgctaattatggttgcattaataagcttctgcattaagccaccagtcaagactgtctctgcacacagacgctccgtggacagaactcagagtagcagcgaatccaatccttccatctcattctttgatacacaggatagtttaagtaattctgatattatcacttag

SEQ ID NO: 68447 - protein, 634 aa, Giardia lamblia ATCC 50803
MILALLHTLLLLIRSAYLSTESKIVLDVISVSDTHGWIYGHRHLPEYGDYGTLLSYIERTRQKALESEGRSVLAVDAGDLVEGTGLSDLTKVKGEKILEAASYIGFDLQTIGNHESYYKETTDYIHSKVEALFGDRYITTNVFMRDTNVPVGSGRYKYLVLPTGLRVLMLGFLFHTSPYDGVYTIPAREAIASQEITGVLEKYKYQTDLLVLACHIPTYDLEISEIVTELRAFYNQINYTIPIIIIAGHYHQIKNTYCMDGQDKQCYIVEGGCYLRFMQHVTYEFKPMTYSHEGNTYTGYQFSSVDYSLPYNFTSESLAKRFNLTTETFMTENGAILSNKIAGWVADLNLTAFIGYNKHYYSMFKNATDQDSIFNLWLNGAIPAVFYPTRSTPCLPFPTISSGTARYDFFPGNVTRDDCIAIQPSWQTMSTIRGLTANLIACLFSVKNGLAETMYPLPEGLFDWEDPHLINYQTTLDPFTLNPNKCYDLLTTIKSAESFLALLQEGGACYEEGSGPYSVSPYYDQNGQEVNAIDVLLKYVEMYMPNLDVVSPYILTHDLHQADKDFMMMMGTISFAIYITLIMVALISFCIKPPVKTVSAHRRSVDRTQSSSESNPSISFFDTQDSLSNSDIIT

SEQ ID NO: 68448 - DNA, 1806 bp, Schizosaccharomyces pombe
  CDS (1)..(1806)
atgaagttatcatctttaccttctggattgggcctagcgtctttgcttggtcttatcagttctgctactgcttattcggccaccgatttaactacgatgtatgattggaaccaaataatcaaacctttagaatggggacaattgaatttcattcatactacggatactcacggttggcttggtggtcatcttagagatgctcgttataaagccgactttggtgaattcaaatcgtttgctttgcgcatgaaggaattagctgattttaaaggtgtagacttgttgatggttgacaccggtgatttgcacgacggaaacggcctttctgatgcttctgatcctcagggtatctacacaaacaacattttcacctatcttccctacgatattcttacaattggtaatcacgaattgtaccaagccgccatttctaataacacgcatgagtattttgtgcctcattggaatggtacgtatctcgcttctaacgttcaaatttacaactcatcaaatgaattggagcaatttggtggtgaatccacttactttattacaaaacatggtgttcgaacccttgctatgggttttctcttcaacttcagtagtaatgctaataacactgtcgttacacccgttgaaacagccatcaaatctgaatggtaccaacaacaaatcaacagaaccgacgtcgaccttttcttattgattggtcatatccccgttcgtgattatgatgagtggaaatcactacatgcctctattagaaaagtacatcccaatactcccattcaaatccttggtggtcattctcacattcgtgattttgctgtttacgacgaggcttctgtatctcttgagggtggaagatattgtgaaactgtaggctggctttcaattgacggtctttcagcatccaatgcaacccgccaatatgttggtcgtcccgtcaccaatgagactcgtcaatcatatcccaatcttcctaagcctgctacgcctttgtattatacacgtcgctacattgatttcaaccgtcaaaacttccgcttccatactcaacagtcagaggactccttcgatactccagaaggtgttgaactatcgaaggttattaaacagtaccgtgacgatcttaatctttcatatgtctttggatgcatccctaaaaattattatatgactgaagtctctcctcaagccgaggacagcatcttcaaacttatggtagatcatattttgccagaggttttggtcaatgaaaaccgttcatctgtgcctcatattataattagcaacggaggtggtgttcgtggttctatgtatgaaggaacgtttggacccgacgaaatgttccaacttaacccattccttaccaattattataattacattccagacgttccttacaaatatgccaagaagctttactctatcttgaatggcggttccactcttcgcaacgttaacgattatcttgctgctctcaatcctggttacgttactagcgacgactttggagaagatggcgatgacaccgtccatacctatgtttccacatacgcagtacctaacgttcttcaagctcaagtcggctttaacactacttcagctccagaaaccgttgatgttgttttcctcaactatttccagaccaaagtattgaaggcccttaatacaatggttaacgaaactatttatactttatcaaacgtgacacaatactgggttcgtgaagacggcaaagacagctctccttatatgtttgcccagtacgttcaacaagaatggagtgattactgtgattaa

SEQ ID NO: 68449 - protein, 601 aa, Schizosaccharomyces pombe
MKLSSLPSGLGLASLLGLISSATAYSATDLTTMYDWNQIIKPLEWGQLNFIHTTDTHGWLGGHLRDARYKADFGEFKSFALRMKELADFKGVDLLMVDTGDLHDGNGLSDASDPQGIYTNNIFTYLPYDILTIGNHELYQAAISNNTHEYFVPHWNGTYLASNVQIYNSSNELEQFGGESTYFITKHGVRTLAMGFLFNFSSNANNTVVTPVETAIKSEWYQQQINRTDVDLFLLIGHIPVRDYDEWKSLHASIRKVHPNTPIQILGGHSHIRDFAVYDEASVSLEGGRYCETVGWLSIDGLSASNATRQYVGRPVTNETRQSYPNLPKPATPLYYTRRYIDFNRQNFRFHTQQSEDSFDTPEGVELSKVIKQYRDDLNLSYVFGCIPKNYYMTEVSPQAEDSIFKLMVDHILPEVLVNENRSSVPHIIISNGGGVRGSMYEGTFGPDEMFQLNPFLTNYYNYIPDVPYKYAKKLYSILNGGSTLRNVNDYLAALNPGYVTSDDFGEDGDDTVHTYVSTYAVPNVLQAQVGFNTTSAPETVDVVFLNYFQTKVLKALNTMVNETIYTLSNVTQYWVREDGKDSSPYMFAQYVQQEWSDYCD

SEQ ID NO: 68450 - DNA, 26 bp, Artificial sequence
  Primer sequence
atgatactaaagcttgtacactgttt

SEQ ID NO: 68451 - DNA, 26 bp, Artificial sequence
  Primer sequence
ctaaaattgagaaaagtaatcccgta

SEQ ID NO: 68452 - protein, 679 aa, Artificial sequence
  Consensus
  Variant (2)..(4): Xaa in position 2 to 4 is any amino acid
  Variant (12)..(13): Xaa in position 12 to 13 is any amino acid
  Variant (14)..(14): Xaa in position 14 is any or no amino acid
  Variant (16)..(20): Xaa in position 16 to 20 is any amino acid
  Variant (21)..(24): Xaa in position 21 to 24 is any or no amino acid
  Variant (26)..(27): Xaa in position 26 to 27 is any amino acid
  Variant (28)..(29): Xaa in position 28 to 29 is any or no amino acid
  Variant (31)..(33): Xaa in position 31 to 33 is any amino acid
  Variant (36)..(37): Xaa in position 36 to 37 is any amino acid
  Variant (38)..(49): Xaa in position 38 to 49 is any or no amino acid
  Variant (51)..(51): Xaa in position 51 is any amino acid
  Variant (53)..(54): Xaa in position 53 to 54 is any amino acid
  Variant (56)..(56): Xaa in position 56 is any amino acid
  Variant (59)..(61): Xaa in position 59 to 61 is any amino acid
  Variant (63)..(63): Xaa in position 63 is any amino acid
  Variant (66)..(66): Xaa in position 66 is any amino acid
  Variant (68)..(72): Xaa in position 68 to 72 is any amino acid
  Variant (73)..(84): Xaa in position 73 to 84 is any or no amino acid
  Variant (86)..(97): Xaa in position 86 to 97 is any amino acid
  Variant (99)..(102): Xaa in position 99 to 102 is any amino acid
  Variant (109)..(126): Xaa in position 109 to 126 is any amino acid
  Variant (127)..(129): Xaa in position 127 to 129 is any or no amino acid
  Variant (131)..(133): Xaa in position 131 to 133 is any amino acid
  Variant (135)..(153): Xaa in position 135 to 153 is any amino acid
  Variant (154)..(160): Xaa in position 154 to 160 is any or no amino acid
  Variant (162)..(171): Xaa in position 162 to 171 is any amino acid
  Variant (172)..(176): Xaa in position 172 to 176 is any or no amino acid
  Variant (178)..(180): Xaa in position 178 to 180 is any amino acid
  Variant (181)..(181): Xaa in position 181 is any or no amino acid
  Variant (183)..(190): Xaa in position 183 to 190 is any amino acid
  Variant (192)..(201): Xaa in position 192 to 201 is any amino acid
  Variant (202)..(202): Xaa in position 202 is any or no amino acid
  Variant (204)..(211): Xaa in position 204 to 211 is any amino acid
  Variant (212)..(216): Xaa in position 212 to 216 is any or no amino acid
  Variant (218)..(222): Xaa in position 218 to 222 is any amino acid
  Variant (225)..(225): Xaa in position 225 is any amino acid
  Variant (227)..(230): Xaa in position 227 to 230 is any amino acid
  Variant (231)..(238): Xaa in position 231 to 238 is any or no amino acid
  Variant (240)..(247): Xaa in position 240 to 247 is any amino acid
  Variant (249)..(254): Xaa in position 249 to 254 is any amino acid
  Variant (255)..(259): Xaa in position 255 to 259 is any or no amino acid
  Variant (261)..(263): Xaa in position 261 to 263 is any amino acid
  Variant (267)..(267): Xaa in position 267 is any amino acid
  Variant (269)..(269): Xaa in position 269 is any amino acid
  Variant (272)..(275): Xaa in position 272 to 275 is any amino acid
  Variant (277)..(284): Xaa in position 277 to 284 is any amino acid
  Variant (285)..(290): Xaa in position 285 to 290 is any or no amino acid
  Variant (292)..(294): Xaa in position 292 to 294 is any amino acid
  Variant (297)..(297): Xaa in position 297 is any amino acid
  Variant (299)..(300): Xaa in position 299 to 300 is any amino acid
  Variant (302)..(309): Xaa in position 302 to 309 is any amino acid
  Variant (310)..(360): Xaa in position 310 to 360 is any or no amino acid
  Variant (362)..(362): Xaa in position 362 is any amino acid
  Variant (364)..(364): Xaa in position 364 is any amino acid
  Variant (366)..(371): Xaa in position 366 to 371 is any amino acid
  Variant (372)..(373): Xaa in position 372 to 373 is any or no amino acid
  Variant (375)..(379): Xaa in position 375 to 379 is any amino acid
  Variant (380)..(390): Xaa in position 380 to 390 is any or no amino acid
  Variant (392)..(392): Xaa in position 392 is any amino acid
  Variant (394)..(395): Xaa in position 394 to 395 is any amino acid
  Variant (397)..(409): Xaa in position 397 to 409 is any amino acid
  Variant (411)..(411): Xaa in position 411 is any amino acid
  Variant (413)..(416): Xaa in position 413 to 416 is any amino acid
  Variant (418)..(443): Xaa in position 418 to 443 is any amino acid
  Variant (444)..(445): Xaa in position 444 to 445 is any or no amino acid
  Variant (448)..(461): Xaa in position 448 to 461 is any amino acid
  Variant (462)..(468): Xaa in position 462 to 468 is any or no amino acid
  Variant (470)..(470): Xaa in position 470 is any amino acid
  Variant (472)..(473): Xaa in position 472 to 473 is any amino acid
  Variant (475)..(479): Xaa in position 475 to 479 is any amino acid
  Variant (481)..(481): Xaa in position 481 is any amino acid
  Variant (483)..(491): Xaa in position 483 to 491 is any amino acid
  Variant (494)..(502): Xaa in position 494 to 502 is any amino acid
  Variant (503)..(504): Xaa in position 503 to 504 is any or no amino acid
  Variant (506)..(515): Xaa in position 506 to 515 is any amino acid
  Variant (518)..(534): Xaa in position 518 to 534 is any amino acid
  Variant (535)..(623): Xaa in position 535 to 623 is any or no amino acid
  Variant (626)..(626): Xaa in position 626 is any amino acid
  Variant (628)..(628): Xaa in position 628 is any amino acid
  Variant (630)..(634): Xaa in position 630 to 634 is any amino acid
  Variant (638)..(639): Xaa in position 638 to 639 is any amino acid
  Variant (641)..(670): Xaa in position 641 to 670 is any amino acid
  Variant (671)..(678): Xaa in position 671 to 678 is any or no amino acid
NXXXTTDTHGWXXXHXXXXXXXXXYXXXXGXXXSFXXXXXXXXXXXXXXDXLXXDXGDXXXGXGLXDXXXXXXXXXXXXXXXXXGXXXXXXXXXXXXDXXXXGNHELYXXXXXXXXXXXXXXXXXXXXXYXXXNXXXXXXXXXXXXXXXXXXXXXXXXXXTXXXXXXXXXXXXXXXFXXXXFXXXXXXXXVXXXXXXXXXXXWXXXXXXXXXXXXXDXXXXXGHXPXXXXXXXXXXXXEXXXXXXXXRXXXXXXXXXXXIXXXGGHXHXRDXXXXDXXXXXXXXXXXXXXGXXXETXGXXSXXXXXXXXXXXXXXXXXXXXXXXXXXXXXXXXXXXXXXXXXXXXXXXXXXXXXXXXXXXRXYXDXXXXXXXXHXXXXXXXXXXXXXXXXFXTXXGXXXXXXXXXXXXXLXLXXXXGXXXXXXXXXXXXXXXXXXXXXXXXXXXXLPXXXXXXXXXXXXXXXXXXXXXNXGXXRXXXXXGXFXXXXXXXXXPFXXXXXXXXXXXPXXXXXXXXXXLNXXXXXXXXXXXXXXXXXXXXXXXXXXXXXXXXXXXXXXXXXXXXXXXXXXXXXXXXXXXXXXXXXXXXXXXXXXXXXXXXXXXXXXXXXXXXXXXXXXXXXXXXXXGYXTXDXXXXXGDDXXHXXXXXXXXXXXXXXXXXXXXXXXXXXXXXXXXXXXXXXF

SEQ ID NO: 68453 - protein, 11 aa, Artificial sequence
  Consensus
  Variant (2)..(2): Xaa in position 2 is Phe, Ile or Leu
  Variant (3)..(3): Xaa in position 3 is Ile, Leu or Val
  Variant (4)..(5): Xaa in position 4 to 5 is any amino acid
  Variant (6)..(6): Xaa in position 6 is Ser or Thr
  Variant (8)..(8): Xaa in position 8 is any amino acid
NXXXXXDXHGW

SEQ ID NO: 68454 - protein, 18 aa, Artificial sequence
  Consensus
  Variant (2)..(2): Xaa in position 2 is Phe, Leu or Val
  Variant (3)..(3): Xaa in position 3 is Ile or Leu
  Variant (4)..(4): Xaa in position 4 is Ile, Leu, Met or Val
  Variant (5)..(5): Xaa in position 5 is Ile, Leu or Val
  Variant (6)..(6): Xaa in position 6 is Asp or Glu
  Variant (7)..(7): Xaa in position 7 is Ala, Ser or Thr
  Variant (10)..(11): Xaa in position 10 to 11 is any amino acid
  Variant (12)..(12): Xaa in position 12 is Asp, Glu or Thr
  Variant (14)..(14): Xaa in position 14 is Ala, Gly, Asn, Ser or Thr
  Variant (16)..(16): Xaa in position 16 is Phe or Leu
  Variant (17)..(17): Xaa in position 17 is any amino acid
  Variant (18)..(18): Xaa in position 18 is Asp or Ser
DXXXXXXGDXXXGXGXXX

SEQ ID NO: 68455 - protein, 11 aa, Artificial sequence
  Consensus
  Variant (2)..(2): Xaa in position 2 is Ile, Leu or Val
  Variant (3)..(3): Xaa in position 3 is Ile, Leu or Met
  Variant (4)..(4): Xaa in position 4 is Cys, Ser, Thr or Val
  Variant (5)..(5): Xaa in position 5 is any amino acid
DXXXXGNHELY

SEQ ID NO: 68456 - protein, 51 aa, Artificial sequence
  Consensus
  Variant (2)..(2): Xaa in position 2 is any amino acid
  Variant (3)..(3): Xaa in position 3 is Phe, Ile, Leu or Val
  Variant (4)..(4): Xaa in position 4 is Ala, Ile, Leu or Val
  Variant (5)..(5): Xaa in position 5 is Ile, Leu or Val
  Variant (6)..(6): Xaa in position 6 is any amino acid
  Variant (9)..(23): Xaa in position 9 to 23 is any amino acid
  Variant (24)..(26): Xaa in position 24 to 26 is any or no amino acid
  Variant (28)..(37): Xaa in position 28 to 37 is any amino acid
  Variant (38)..(38): Xaa in position 38 is any or no amino acid
  Variant (40)..(40): Xaa in position 40 is Ala or Gly
  Variant (42)..(42): Xaa in position 42 is any amino acid
  Variant (44)..(44): Xaa in position 44 is Ile or Val
  Variant (47)..(50): Xaa in position 47 to 50 is any amino acid
  Variant (51)..(51): Xaa in position 51 is Asp or Asn
DXXXXXGHXXXXXXXXXXXXXXXXXXRXXXXXXXXXXXGXHXHXRDXXXXX

SEQ ID NO: 68457 - protein, 26 aa, Artificial sequence
  Consensus
  Variant (2)..(2): Xaa in position 2 is Ala, Asp, Gly, Ser or Thr
  Variant (4)..(4): Xaa in position 4 is Ala, Gly, Ser or Thr
  Variant (5)..(5): Xaa in position 5 is any amino acid
  Variant (7)..(7): Xaa in position 7 is any amino acid
  Variant (8)..(8): Xaa in position 8 is Asp, Gly, Asn or Ser
  Variant (9)..(9): Xaa in position 9 is Ile, Leu, Met or Val
  Variant (10)..(11): Xaa in position 10 to 11 is any amino acid
  Variant (13)..(16): Xaa in position 13 to 16 is any amino acid
  Variant (17)..(17): Xaa in position 17 is any or no amino acid
  Variant (19)..(23): Xaa in position 19 to 23 is any amino acid
  Variant (24)..(24): Xaa in position 24 is any or no amino acid
NXGXXRXXXXXGXXXXXDXXXXXXPF

SEQ ID NO: 68458 - DNA, 942 bp, Saccharomyces cerevisiae; identical to SEQ ID NO: 50322
  CDS (1)..(942)

SEQ ID NO: 68459 - protein, 313 aa, Saccharomyces cerevisiae; identical to SEQ ID NO: 50323

SEQ ID NO: 68460 - DNA, 819 bp, Arabidopsis thaliana; identical to SEQ ID NO: 50324
  CDS (1)..(819)

SEQ ID NO: 68461 - protein, 272 aa, Arabidopsis thaliana; identical to SEQ ID NO: 50325

SEQ ID NO: 68462 - DNA, 978 bp, Arabidopsis thaliana; identical to SEQ ID NO: 50326
  CDS (1)..(978)

SEQ ID NO: 68463 - protein, 325 aa, Arabidopsis thaliana; identical to SEQ ID NO: 50327

SEQ ID NO: 68464 - DNA, 771 bp, Thermoanaerobacter tengcongensis MB4; identical to SEQ ID NO: 50328
  CDS (1)..(771): transl_table=11

SEQ ID NO: 68465 - protein, 256 aa, Thermoanaerobacter tengcongensis MB4; identical to SEQ ID NO: 50329

SEQ ID NO: 68466 - DNA, 897 bp, Eremothecium gossypii; identical to SEQ ID NO: 50330
  CDS (1)..(897)

SEQ ID NO: 68467 - protein, 298 aa, Eremothecium gossypii; identical to SEQ ID NO: 50331

SEQ ID NO: 68468 - DNA, 1329 bp, Neurospora crassa; identical to SEQ ID NO: 50332
  CDS (1)..(1329)

SEQ ID NO: 68469 - protein, 442 aa, Neurospora crassa; identical to SEQ ID NO: 50333

SEQ ID NO: 68470 - DNA, 1254 bp, Magnaporthe grisea 70-15; identical to SEQ ID NO: 50334
  CDS (1)..(1254)

SEQ ID NO: 68471 - protein, 417 aa, Magnaporthe grisea 70-15; identical to SEQ ID NO: 50335

SEQ ID NO: 68472 - DNA, 1176 bp, Gibberella zeae PH-1; identical to SEQ ID NO: 50336
  CDS (1)..(1176)

SEQ ID NO: 68473 - protein, 391 aa, Gibberella zeae PH-1; identical to SEQ ID NO: 50337

SEQ ID NO: 68474 - DNA, 1425 bp, Gibberella zeae PH-1; identical to SEQ ID NO: 50338
  CDS (1)..(1425)

SEQ ID NO: 68475 - protein, 474 aa, Gibberella zeae PH-1; identical to SEQ ID NO: 50339

SEQ ID NO: 68476 - DNA, 1095 bp, Ustilago maydis 521; identical to SEQ ID NO: 50340
  CDS (1)..(1095)

SEQ ID NO: 68477 - protein, 364 aa, Ustilago maydis 521; identical to SEQ ID NO: 50341

SEQ ID NO: 68478 - DNA, 897 bp, Candida glabrata CBS138; identical to SEQ ID NO: 50342
  CDS (1)..(897)

SEQ ID NO: 68479 - protein, 298 aa, Candida glabrata CBS138; identical to SEQ ID NO: 50343

SEQ ID NO: 68480 - DNA, 975 bp, Kluyveromyces lactis NRRL Y-1140; identical to SEQ ID NO: 50344
  CDS (1)..(975)

SEQ ID NO: 68481 - protein, 324 aa, Kluyveromyces lactis NRRL Y-1140; identical to SEQ ID NO: 50345

SEQ ID NO: 68482 - DNA, 1041 bp, Debaryomyces hansenii CBS767; identical to SEQ ID NO: 50346
  CDS (1)..(1041)

SEQ ID NO: 68483 - protein, 346 aa, Debaryomyces hansenii CBS767; identical to SEQ ID NO: 50347

SEQ ID NO: 68484 - DNA, 936 bp, Oryza sativa (japonica cultivar-group); identical to SEQ ID NO: 50348
  CDS (1)..(936)

SEQ ID NO: 68485 - protein, 311 aa, Oryza sativa (japonica cultivar-group); identical to SEQ ID NO: 50349

SEQ ID NO: 68486 - DNA, 954 bp, Yarrowia lipolytica CLIB99; identical to SEQ ID NO: 50350
  CDS (1)..(954)

SEQ ID NO: 68487 - protein, 317 aa, Yarrowia lipolytica CLIB99; identical to SEQ ID NO: 50351

SEQ ID NO: 68488 - DNA, 1380 bp, Cryptococcus neoformans var. neoformans JEC21; identical to SEQ ID NO: 50352
  CDS (1)..(1380)

SEQ ID NO: 68489 - protein, 459 aa, Cryptococcus neoformans var. neoformans JEC21; identical to SEQ ID NO: 50353

SEQ ID NO: 68490 - DNA, 969 bp, Dictyostelium discoideum; identical to SEQ ID NO: 50354
  CDS (1)..(969)

SEQ ID NO: 68491 - protein, 322 aa, Dictyostelium discoideum; identical to SEQ ID NO: 50355

SEQ ID NO: 68492 - DNA, 1215 bp, Aspergillus nidulans FGSC A4; identical to SEQ ID NO: 50356
  CDS (1)..(1215)

SEQ ID NO: 68493 - protein, 404 aa, Aspergillus nidulans FGSC A4; identical to SEQ ID NO: 50357

SEQ ID NO: 68494 - DNA, 972 bp, Candida albicans SC5314; identical to SEQ ID NO: 50358
  CDS (1)..(972): transl_table=12

SEQ ID NO: 68495 - protein, 323 aa, Candida albicans SC5314; identical to SEQ ID NO: 50359

SEQ ID NO: 68496 - DNA, 1386 bp, Aspergillus fumigatus Af293; identical to SEQ ID NO: 50360
  CDS (1)..(1386)

SEQ ID NO: 68497 - protein, 461 aa, Aspergillus fumigatus Af293; identical to SEQ ID NO: 50361

SEQ ID NO: 68498 - DNA, 1380 bp, Cryptococcus neoformans var; identical to SEQ ID NO: 50362
  CDS (1)..(1380)

SEQ ID NO: 68499 - protein, 459 aa, Cryptococcus neoformans var; identical to SEQ ID NO: 50363

SEQ ID NO: 68500 - DNA, 957 bp, Arabidopsis thaliana; identical to SEQ ID NO: 50364
  CDS (1)..(957)

SEQ ID NO: 68501 - protein, 318 aa, Arabidopsis thaliana; identical to SEQ ID NO: 50365

SEQ ID NO: 68502 - DNA, 1008 bp, Schizosaccharomyces pombe; identical to SEQ ID NO: 50366
  CDS (1)..(1008)

SEQ ID NO: 68503 - protein, 335 aa, Schizosaccharomyces pombe; identical to SEQ ID NO: 50367

SEQ ID NO: 68504 - DNA, 25 bp, Artificial sequence
  Primer sequence
atgaataaacttgttgatgcccact

SEQ ID NO: 68505 - DNA, 27 bp, Artificial sequence
  Primer sequence
tcacttgataaatttctgaaagttttc

SEQ ID NO: 68506 - protein, 495 aa, Artificial sequence; identical to SEQ ID NO: 50370
  Consensus
  Variant (2)..(2): Xaa in position 2 is any amino acid
  Variant (6)..(32): Xaa in position 6 to 32 is any amino acid
  Variant (33)..(43): Xaa in position 33 to 43 is any or no amino acid
  Variant (45)..(57): Xaa in position 45 to 57 is any amino acid
  Variant (58)..(84): Xaa in position 58 to 84 is any or no amino acid
  Variant (87)..(87): Xaa in position 87 is any amino acid
  Variant (91)..(96): Xaa in position 91 to 96 is any amino acid
  Variant (97)..(146): Xaa in position 97 to 146 is any or no amino acid
  Variant (148)..(164): Xaa in position 148 to 164 is any amino acid
  Variant (165)..(173): Xaa in position 165 to 173 is any or no amino acid
  Variant (176)..(176): Xaa in position 176 is any amino acid
  Variant (180)..(189): Xaa in position 180 to 189 is any amino acid
  Variant (190)..(227): Xaa in position 190 to 227 is any or no amino acid
  Variant (229)..(238): Xaa in position 229 to 238 is any amino acid
  Variant (240)..(246): Xaa in position 240 to 246 is any amino acid
  Variant (248)..(248): Xaa in position 248 is any amino acid
  Variant (250)..(250): Xaa in position 250 is any amino acid
  Variant (252)..(254): Xaa in position 252 to 254 is any amino acid
  Variant (256)..(270): Xaa in position 256 to 270 is any amino acid
  Variant (271)..(337): Xaa in position 271 to 337 is any or no amino acid
  Variant (341)..(342): Xaa in position 341 to 342 is any amino acid
  Variant (344)..(358): Xaa in position 344 to 358 is any amino acid
  Variant (359)..(368): Xaa in position 359 to 368 is any or no amino acid
  Variant (370)..(370): Xaa in position 370 is any amino acid
  Variant (372)..(393): Xaa in position 372 to 393 is any amino acid
  Variant (394)..(405): Xaa in position 394 to 405 is any or no amino acid
  Variant (407)..(407): Xaa in position 407 is any amino acid
  Variant (409)..(409): Xaa in position 409 is any amino acid
  Variant (411)..(445): Xaa in position 411 to 445 is any amino acid
  Variant (446)..(494): Xaa in position 446 to 494 is any or no amino acid

SEQ ID NO: 68507 - protein, 5 aa, Artificial sequence
  Consensus
  Variant (2)..(2): Xaa in position 2 is Ala or Ser
DXHCH

SEQ ID NO: 68508 - protein, 11 aa, Artificial sequence
  Consensus
  Variant (2)..(3): Xaa in position 2 to 3 is any amino acid
  Variant (4)..(4): Xaa in position 4 is any or no amino acid
  Variant (7)..(7): Xaa in position 7 is any amino acid
  Variant (11)..(11): Xaa in position 11 is Phe, Trp or Tyr
VXXXFGXHPWX

SEQ ID NO: 68509 - protein, 12 aa, Artificial sequence
  Consensus
  Variant (3)..(3): Xaa in position 3 is Ile or Val
  Variant (5)..(5): Xaa in position 5 is Ile or Leu
  Variant (7)..(9): Xaa in position 7 to 9 is any amino acid
  Variant (10)..(11): Xaa in position 10 to 11 is any or no amino acid
GEXGXDXXXXXR

SEQ ID NO: 68510 - protein, 37 aa, Artificial sequence; identical to SEQ ID NO: 50374
  Consensus
  Variant (2)..(3): Xaa in position 2 to 3 is any amino acid
  Variant (4)..(4): Xaa in position 4 is Ile or Val
  Variant (5)..(5): Xaa in position 5 is Phe or Leu
  Variant (6)..(10): Xaa in position 6 to 10 is any amino acid
  Variant (11)..(11): Xaa in position 11 is Ile or Leu
  Variant (13)..(18): Xaa in position 13 to 18 is any amino acid
  Variant (19)..(19): Xaa in position 19 is Ala, Ile, Leu or Val
  Variant (21)..(21): Xaa in position 21 is Phe, Ile, Leu or Val
  Variant (23)..(23): Xaa in position 23 is Cys, Asp, Gly or Ser
  Variant (25)..(27): Xaa in position 25 to 27 is any amino acid
  Variant (29)..(29): Xaa in position 29 is any amino acid
  Variant (30)..(36): Xaa in position 30 to 36 is any or no amino acid

SEQ ID NO: 68511 - protein, 10 aa, Artificial sequence
  Consensus
  Variant (2)..(2): Xaa in position 2 is any amino acid
  Variant (3)..(3): Xaa in position 3 is Asp, Glu, Gly, Asn, Gln or Thr
  Variant (4)..(4): Xaa in position 4 is any amino acid
  Variant (5)..(5): Xaa in position 5 is Ile, Leu or Val
  Variant (7)..(7): Xaa in position 7 is any amino acid
  Variant (9)..(9): Xaa in position 9 is Ser or Thr
PXXXXLXEXD

SEQ ID NO: 68512 - DNA, 1618 bp, Saccharomyces cerevisiae
  CDS (292)..(1113)
acacgtaatcgccttacctacgaggggagaaaacgttccctctgcatgtatatatatatatatatatataaatattaaatcttgaatattgttggattaagcatgtgcttgacaaatggtgtatgggtttgtagacgatgagagtggaagggagattaaaagtttattgcagatgcgaacatctgcacaaaagtacttgaatgtactaagcagaaaaagttctaatacatattagcaggaggcccaacagtcacacaagttcagcagaactgccaattaatcgaaaagaatatgtatgtttctaatgggaaagacacttgccagttgttggggcccgtgtctctttttgtccagacattgatgggtatgacagccgtgattgtgttattggtgaaaagaaactatgagcatccaaggagaaaaatgattgtgtggagttatgacattggaaaacaaatcatcggctctcttggaatccattttttgaatctaggcatcagcatactgaagaaaagacgaaggtcactcttcgcaatcactgcaaaaggcaatgatgatgaggatcaatgcgattggtattttcttaacttactcctggatactactgttgggattcccattctttggttgtgcttatacataattgaaaaagtgctaaaatccttacacttccaaaacattgaaagtggtaattattttccatctaaaaccgttgggagccaccccagaaaacccttattctctgccttcgtgaaacagctgcttatattcattgttgggctgggcgtgatgaagttctgcgtgtttctaatactaaactacttagaagacttggcatactggttcgccgatcttatccttggctggtcagattcatggccaaactttcaagtttttctggtcatgtttgtctttcctatcttactgaattgcttccagtacttttgtgtcgacaatgtcatcaggttacattctgagagcctaacgataaccaatgcagagaattttgaaacgaacacattcctaaatgacgaaattcctgatttatcggaagtctcaaatgaagtgcctaacaaggataacaacatttccagctatggtagcataatatagtattccaaggataaggaaagcatgcactgtttatttcctttccttgcttaattgattttttttaaagggaacaaacattttgatttcaatttccacaagcctagactcttcaacacataatctgtgggttattgtttgggaaagcattctccgctagaagaatgaaactggcgctcaggtttgattctataactacggcagtttttcctattctattttcgttttttgattttcccgccgcattggatattcaattcgcgacgctaataattggcatttcgtgttcttaagtaatttcgtgtttcaaataaccgtaaacagagaaagacccaagaatttcagatggcttagaagaggtagacattaaatcaatctgtatgtgatggagagggagtgtatttaaaagacgtaagaaaatgaattatcaagatccgttatggccatctagtctctttcttgtacactagttgtctaacacaaccaacaaattagaatatatatcgca

SEQ ID NO: 68513 - protein, 273 aa, Saccharomyces cerevisiae
MYVSNGKDTCQLLGPVSLFVQTLMGMTAVIVLLVKRNYEHPRRKMIVWSYDIGKQIIGSLGIHFLNLGISILKKRRRSLFAITAKGNDDEDQCDWYFLNLLLDTTVGIPILWLCLYIIEKVLKSLHFQNIESGNYFPSKTVGSHPRKPLFSAFVKQLLIFIVGLGVMKFCVFLILNYLEDLAYWFADLILGWSDSWPNFQVFLVMFVFPILLNCFQYFCVDNVIRLHSESLTITNAENFETNTFLNDEIPDLSEVSNEVPNKDNNISSYGSII

SEQ ID NO: 68514 - DNA, 615 bp, Xenopus tropicalis
  CDS (1)..(615)
atggggacgagcaatggcagcaagagcctgaccccggggccgtccccgcccgaccccagtcccactgctccgggctgcgggaatggggcaatgatgggctctttcgggatcttcttgcaaggcctgctggctgtgatggctttcagcatcctcatgttaaaacgccttcgagaaccaaagcatgaaagacgtccttggaaaatatggtttttggacacatccaagcaagctatagggatgctgtttatccattttgcaaacgtctacttgtcggaccttaccggggaagatccttgctctatatatctgattaatttcctgctggacgctacattgggaatgttgctcatttatatcggggttcgagtagtgagttgcatcgtggagtggaggcagtgggagtccttgcgatttggcgaatatggtgaacctatgcagtgcaaagcctgggttggtcagtgtgctctctacattgtcatcatgatgtttgagaaagcagccatcatccttgtgctgctcataccacatctcaaagaggttgccaaggtaaaacctataaaaaaaccctcagctggaacttgcaactgtcatgctgattgtcccgttctttgttaa

SEQ ID NO: 68515 - protein, 204 aa, Xenopus tropicalis
MGTSNGSKSLTPGPSPPDPSPTAPGCGNGAMMGSFGIFLQGLLAVMAFSILMLKRLREPKHERRPWKIWFLDTSKQAIGMLFIHFANVYLSDLTGEDPCSIYLINFLLDATLGMLLIYIGVRVVSCIVEWRQWESLRFGEYGEPMQCKAWVGQCALYIVIMMFEKAAIILVLLIPHLKEVAKVKPIKKPSAGTCNCHADCPVLC

SEQ ID NO: 68516 - DNA, 804 bp, Gallus gallus
  CDS (1)..(804)
atggccgcgacccgtccgactcacggctgcggcagcggagcgctactgggctgcttcggagtgctgctgcaggcattgctggcgctgtgcgtcttctgcacgctgatgttaaaacgatttaaggaaccaaaagaagagaggcgtccctggaggatatggttttacgatacctccaagcaagcaattggtgcccttttcatccactttgccaatatttttctgtctgaacgcactgagaaggacccttgctctctctaccttattaatttcatccttgatgccacgctggggatgctgctgatttggcttggtgtgaaggtggtgtcctgggctgtgcagcgtcagaagtacacatatctggtctttggagaatatggtgatcctccacaagctgctgcttggattagccagtgtatcctctacctgctgataatggttgtggagaagaccctgatcaaccttgtgctgctgatccctggttggacagagcttcagcagatcctcctgagttacatcccaaacccccagttggagcttttcctggtcatgcttgttgtgccttttattgtaaatgccgttatgttctgggttgtggacagcttgattatgagaaaatacaagcagaaagacacgttgaacatcaatggatccacagaaaccccacaagctaggaggagtgaggaatctcaggtgctgctctctccagacatggattttgaccagtctgaaagtgaccaggatatctcaggactccagggaacaaaccagaagatgaagcagcccagctaccacgtggtcatctga

SEQ ID NO: 68517 - protein, 267 aa, Gallus gallus
MAATRPTHGCGSGALLGCFGVLLQALLALCVFCTLMLKRFKEPKEERRPWRIWFYDTSKQAIGALFIHFANIFLSERTEKDPCSLYLINFILDATLGMLLIWLGVKVVSWAVQRQKYTYLVFGEYGDPPQAAAWISQCILYLLIMVVEKTLINLVLLIPGWTELQQILLSYIPNPQLELFLVMLVVPFIVNAVMFWVVDSLIMRKYKQKDTLNINGSTETPQARRSEESQVLLSPDMDFDQSESDQDISGLQGTNQKMKQPSYHVVI

SEQ ID NO: 68518 - DNA, 867 bp, Mus musculus
  CDS (1)..(867)
atgcaaggcccgggagggaacgtgagccgcggattgccgagcgggccggcctccacggtcgcgtccggggcgggccgctgtgagagcggcgcgctcatgcacagtttcggcatcttcctgcaggggctgctcggcgtcgtggccttcagcacattgatgcttaaacgcttcagagaaccaaagcatgaaagacggccgtggaggatatggtttttagacacttccaaacaagccatagggatgctcttcatccactttgcaaatgtgtacctagcagatctcactgaagaggacccttgttcactgtacctcatcaactttcttctggacgccactgtaggcatgctgctcatttatgtgggcgtacgcgccgccggtgtcttggtggagtggcagcagtgggaatccctgcgtttgggagaatatggagaccctctgcagtgcggggcctgggtaggacagtgcgccctctacatggtgatcatgatctttgaaaagtccgtggtcttcatcgtcctcctcatactccagtggaaaaaggtggccctattgaatccaattgaaaaccccgacctgaagctggccatcgtcatgctgatagtccccttctttgtcaatgctttcatgttctgggtagtggacaatttcctcatgagaaaggggaagacgaaagctaaactaaaagaaagaggagccaaccaggactcaaggaatgggagcaaggttcgctaccgaagggcagcatcccatgaggagtctgagtctgagatcctgatctcagctgacgacgagatggaggagtctgacgccgaggaggacctccggagacctgtgaaaaagaagcaccgcttcgggctgcctgtatga

SEQ ID NO: 68519 - protein, 288 aa, Mus musculus
MQGPGGNVSRGLPSGPASTVASGAGRCESGALMHSFGIFLQGLLGVVAFSTLMLKRFREPKHERRPWRIWFLDTSKQAIGMLFIHFANVYLADLTEEDPCSLYLINFLLDATVGMLLIYVGVRAAGVLVEWQQWESLRLGEYGDPLQCGAWVGQCALYMVIMIFEKSVVFIVLLILQWKKVALLNPIENPDLKLAIVMLIVPFFVNAFMFWVVDNFLMRKGKTKAKLKERGANQDSRNGSKVRYRRAASHEESESEILISADDEMEESDAEEDLRRPVKKKHRFGLPV

SEQ ID NO: 68520 - DNA, 885 bp, Homo sapiens
  CDS (1)..(885)
atgcagggccccgccgggaacgcgagccggggactgccaggcgggccgccctccacagtcgcgtccggggcgggccgctgcgagagcggcgcgctcatgcacagcttcggcatcttcctgcaggggctgctcggcgtcgtggccttcagcacgttaatgctcaaacgcttcagagaaccaaagcatgaaagacgtccgtggaggatatggtttttagacacttccaaacaagccataggaatgctgttcatccactttgcaaatgtatacctagcagatctcactgaagaggacccttgttcactgtacctcatcaacttcctcctggacgccactgtgggcatgctgctcatctacgtgggggtgcgcgccgtcagcgtcctggtagagtggcagcagtgggagtccctgcgcttcggcgaatatggagaccctctgcagtgtggagcctgggtcgggcagtgcgctctttacatcgtgatcatgatttttgaaaagtctgtcgtcttcatcgtcctcctaatacttcagtggaaaaaggtggccctgttgaatcccattgaaaacccagacttgaagctggccatcgtcatgctgatcgtccccttctttgtcaacgctttgatgttttgggtagtggacaatttcctcatgagaaaggggaagacgaaagctaagctagaagaaaggggagccaaccaggactcgaggaatgggagcaaggtccgctaccggagggccgcatcccacgaggagtctgagtctgagatcctgatctcagcggatgatgagatggaggagtccgacgtggaggaggacctccgcagactgacccccctcaagcctgtgaagaaaaagaagcaccgctttgggctacccgtatga

SEQ ID NO: 68521 - protein, 294 aa, Homo sapiens
MQGPAGNASRGLPGGPPSTVASGAGRCESGALMHSFGIFLQGLLGVVAFSTLMLKRFREPKHERRPWRIWFLDTSKQAIGMLFIHFANVYLADLTEEDPCSLYLINFLLDATVGMLLIYVGVRAVSVLVEWQQWESLRFGEYGDPLQCGAWVGQCALYIVIMIFEKSVVFIVLLILQWKKVALLNPIENPDLKLAIVMLIVPFFVNALMFWVVDNFLMRKGKTKAKLEERGANQDSRNGSKVRYRRAASHEESESEILISADDEMEESDVEEDLRRLTPLKPVKKKKHRFGLPV

SEQ ID NO: 68522 - DNA, 867 bp, Rattus norvegicus
  CDS (1)..(867)
atgcaaggcccgggagggaacgtgagccgcggattgccgggcgggccggcctccacggtcgcgtccggggcgggccgctgtgagagcggcgcgctcatgcacagtttcggcatcttcctgcaggggctgctcggcgtcgtggccttcagcacattgatgcttaaacgcttccgagaaccaaagcatgaaagacggccatggaggatatggtttttagacacttccaaacaagccatagggatgctcttcatccactttgcaaacgtgtacctagcggatctcactgaagaggacccttgctcactgtacctcatcaacttccttctggacgccactgtaggcatgctcctcatttatgtgggcgtacgtgccgtcggtgtgttggtggagtggcagcagtgggagtccctgcgttttggagaatatggagaccctctacagtgtggggcctgggtcgggcagtgtgccctttacatcgtgatcatgatctttgaaaagtccgtggtcttcatcgtccttctcatactccagtggaaaaaggtggccctgctgaatccaattgagaaccctgacctgaagctggccatcgtcatgctcatagtccccttctttgtcaatgctttcatgttctgggtagtggacaatttcctcatgagaaaggggaagacgaaagctaaactcgaagaaagaggagccaaccaggactcaaggaacgggagcaaggttcgctaccgacgggcggcatcccatgaggagtctgagtctgagatcctgatctcggctgacgacgagatggaggagtctgacgccgaggaggacctccggagacctgtgaagaagaaacatcgcttcgggctgcccgtatga

SEQ ID NO: 68523 - protein, 288 aa, Rattus norvegicus
MQGPGGNVSRGLPGGPASTVASGAGRCESGALMHSFGIFLQGLLGVVAFSTLMLKRFREPKHERRPWRIWFLDTSKQAIGMLFIHFANVYLADLTEEDPCSLYLINFLLDATVGMLLIYVGVRAVGVLVEWQQWESLRFGEYGDPLQCGAWVGQCALYIVIMIFEKSVVFIVLLILQWKKVALLNPIENPDLKLAIVMLIVPFFVNAFMFWVVDNFLMRKGKTKAKLEERGANQDSRNGSKVRYRRAASHEESESEILISADDEMEESDAEEDLRRPVKKKHRFGLPV

SEQ ID NO: 68524 - DNA, 837 bp, Danio rerio
  CDS (1)..(837)
atgtttgtttttgtgaaagacagcattaatatgactgatttggtgagcccggagtatcagggctgcgtggacggagctctgatggacggattcagtgtttttatacaggctctgttggcggttctggctttcagcactttaatgttgaagaggtttcgtgaacctgttggaataagaagaccttggaagatctggttctttgacacttctaaacaagcggtcggggctcttttcatgcattttgccaacatattcctttccacactcaccaatgaagatccctgctctctatatttgctgaacttcttgttggatgccacattgggaatgcttgtgatctgggtgggagtgaaagttgtttccaaaatagtggaacataaacagataacactactaatgttcggagaatatggtgatcctcctcgagtcttggcatgggtggctcagtgttcagtgtatttactcatcgttgctctggggaaaagtgtggtctctctggtgctgctcattcctggatggaccaatttggaggaggtggtgctggattacatcccaaacccacagctggagctggccatcgtcatgcttatcgtgcctttcatagtcaactctataatgttctgggtggtggacagtttaacaatgcgcaaatataggaagatgacgtctctggaaggctcacgcgactctccgaaacaagtagacgctttgccagatgagagcaatgatgaagctgaggtgctgctaaagaaagatgatgaagcagcggtgtgttctgaagaggaagatcacgtcacaacagaagaagccttaatacgagtcagcatggaggtttaa

SEQ ID NO: 68525 - protein, 278 aa, Danio rerio
MFVFVKDSINMTDLVSPEYQGCVDGALMDGFSVFIQALLAVLAFSTLMLKRFREPVGIRRPWKIWFFDTSKQAVGALFMHFANIFLSTLTNEDPCSLYLLNFLLDATLGMLVIWVGVKVVSKIVEHKQITLLMFGEYGDPPRVLAWVAQCSVYLLIVALGKSVVSLVLLIPGWTNLEEVVLDYIPNPQLELAIVMLIVPFIVNSIMFWVVDSLTMRKYRKMTSLEGSRDSPKQVDALPDESNDEAEVLLKKDDEAAVCSEEEDHVTTEEALIRVSMEV

SEQ ID NO: 68526 - DNA, 897 bp, Danio rerio
  CDS (1)..(897)
atggcgggtgtcggggtcagtatgctgtcccggggtcagctgccgtctgcatcctctaactcctcgcccactgagctccaggcccagggctgctccaacggggacttcatgggctccttcggcatcttcctgcagggcctgctgggagtggtggccttcagcacccttatgttgaaacgctttagggagcccaagcatgaacggagaccctggaaaatctggtttctggacacctccaaacaggccatagggatgctgttcattcactttgccaatgtctacctgtctgacctcacaaaggaggacccatgttcactatacctgatcaacttcctgttggatgcaacgctgggcatgctggtgatctatggcggtgtgaaggctattagcgttgtggtggaatggagacagtgggattcattgcgttttggagagtatggtgagcctgttcagtgcactgcctgggcgggtcagtgtgccctgtatatcctcatcatgatctttgagaaggtcatgatcatattggttctcctcatcccacagtggaagaagctggctacactcaaccccctgaagaaccctaagctagagctagctatcgtcatgctaatcgtcccgtttttcgtgaacgctcttatgttctgggtggtagataacttcctaatgaagaaggggagaacaaaagccaaactggaggagagagtagcagaagacgatcctcgcggaaacagcaaagtgcgctacagacgggcactgtcacatgatgattcggaatcagaaatcctgttctctgcagatgatgaaatggaggattcagagggtgacgacgatgtacgaagaatcacagggctcaagcctgttaagaaaaagaaacaccgtcttggtattccagtatga

SEQ ID NO: 68527 - protein, 298 aa, Danio rerio
MAGVGVSMLSRGQLPSASSNSSPTELQAQGCSNGDFMGSFGIFLQGLLGVVAFSTLMLKRFREPKHERRPWKIWFLDTSKQAIGMLFIHFANVYLSDLTKEDPCSLYLINFLLDATLGMLVIYGGVKAISVVVEWRQWDSLRFGEYGEPVQCTAWAGQCALYILIMIFEKVMIILVLLIPQWKKLATLNPLKNPKLELAIVMLIVPFFVNALMFWVVDNFLMKKGRTKAKLEERVAEDDPRGNSKVRYRRALSHDDSESEILFSADDEMEDSEGDDDVRRITGLKPVKKKKHRLGIPV

SEQ ID NO: 68528 - DNA, 792 bp, Eremothecium gossypii
  CDS (1)..(792)
atgggtgcggaaaactcatgccggctattgggaccggtggcgctcttcatccagttcttcatggcggccgtggccgtcgggggattgctagttaagcgccagtacgagcaccccaagcgcacgtggcgggtgtggtcatacgatgtgggaaagcagatgatcgggtctgccgggatacacctgctcaatgtgctgctgagcatcatgaagagccagggcctgctcggcacgctgaaaaagacggacgaccagtgcgactggttcttcgtgaacctcttgatggacacgacggtcggcatcccgattttgtggtgctggttggtgctgatccacaaggggctgcaggcgctgggcgtgcagaacatcgagagcggcaactactaccccacgctggacaagccggagcccggcgccgcggtgccgcgcaccggcccgatgttcagcgcgttcgtcaagcagctcctcgtgttcgtgtccgggctcgccatgatgaaggtgtgcattttcctgctgctcggctgcttcgagcagctcgcgaacctcttcgccgacctcgtgctcggctggtccgacccctggcccaacctccaggtgttcctcgtcatgttcgtgttccccgtcctgttgaactgcttccagtacttctgcgtcgacaacatcatcaagttgccatccgaccgcttgacccgccagaacgtcgacaatttcgaccaggagtccatcttcgaacagaacggcgtctacgtgcccaccctgctggcagcggcgaagcaaacatacctggccgtgtga

SEQ ID NO: 68529 - protein, 263 aa, Eremothecium gossypii
MGAENSCRLLGPVALFIQFFMAAVAVGGLLVKRQYEHPKRTWRVWSYDVGKQMIGSAGIHLLNVLLSIMKSQGLLGTLKKTDDQCDWFFVNLLMDTTVGIPILWCWLVLIHKGLQALGVQNIESGNYYPTLDKPEPGAAVPRTGPMFSAFVKQLLVFVSGLAMMKVCIFLLLGCFEQLANLFADLVLGWSDPWPNLQVFLVMFVFPVLLNCFQYFCVDNIIKLPSDRLTRQNVDNFDQESIFEQNGVYVPTLLAAAKQTYLAV

SEQ ID NO: 68530 - DNA, 582 bp, Anopheles gambiae str. PEST
  CDS (1)..(582)
atgtgcagcaaggatgcgctgacggatctgttcggctggtttctgcagggcatactggccaccctcgcctttacctgccttatcgctaaacgcttctgcgaaccacagtacaatcgccgctcatgggaaacctggtggtacgatacgtccaagcagggcatcggtgctctggtgatccacatggccaacgtttatttggccccactcttccaaggcgacccctgtacctggtacattatcaacttcctgctagattctaccatcgggctgttcattatttacatcggcatcaaaacctgtcagtatttagcgcggaagaaaaaatgggatgccatcaactttggtgaatatggtgccccgaaatcctggctctaccaaacgtgtatctacgtgtgcctgatggtggtcgttaagctgataacgacgctaatcattcagttcgatgtgtgggataacgtgaaaaacttcgtcctgtcgccgttccgggatccgcggatagagctggccgtcgtgatgctggtcattccgttcttcgtcaatatcctaatcttctgggtgacggataacttcctgatgaggtag

SEQ ID NO: 68531 - protein, 193 aa, Anopheles gambiae str. PEST
MCSKDALTDLFGWFLQGILATLAFTCLIAKRFCEPQYNRRSWETWWYDTSKQGIGALVIHMANVYLAPLFQGDPCTWYIINFLLDSTIGLFIIYIGIKTCQYLARKKKWDAINFGEYGAPKSWLYQTCIYVCLMVVVKLITTLIIQFDVWDNVKNFVLSPFRDPRIELAVVMLVIPFFVNILIFWVTDNFLMR

SEQ ID NO: 68532 - DNA, 1671 bp, Neurospora crassa
  CDS (1)..(1671)
atgcgcttagtgtcatcgtcctgctccttctccaactcaacgtttcaacgtttcaaaagtggaaagctgggattcaacaaccgaacggctgaaactcgacaagcccacttgttcggaactgtgcaccgatcaaaccaacattattacaccaaaccagccccgacagtacccgcaacaccgcctttatctttgtcaggacagcgtcgcaatgttgatatccgcgaagacataccggttgtaagaatagccggcggtactctgccctctcaccatcgtctgcgcatcggcacagtcaacagcctccatcgtcgcctaggtggcgaggcagctgctggtgcggatacccgtcccgattactttgtcgacccgcaagtagacacccaactcgacgatcccgacgcccaagacacggaaccacaaccattcgaaacctttcctcacgtcgtcaacccacctgctcccaccgggaccgttatatccgtcaccatgactcccacatcgcaacctacgtcgtcaacatcaccacaaccagcctcccccatggctcatcaaacagacaacaacaccgaatgccgcctactcggccctttcgccatcctcgtccaaattgccctcggctgcttggctctattatcactcgtctacaagcgctggcgcgaacggccacaaagaccggtcaagatctggttctttgatgtgtcgaaacaagtctttgggagcgtcttggtgcacgccgccaacgtgttcatgtccatgttgacaagcggcaagtttgagatcaaagtgttggatccggtggcagtggcggtggggaccaagatggtgaagcgcgctgtggaatatgggatattgagtgcgagaggagaagacgagtacacgcccaatccgtgctcgttttatttgttgaacttggctattgatgtatcacaaaaaaaacagacaaccctcggcatcccaatcctcatcctcatcgtccgcctcctctcccgcggcctccaatacacccccctcggccaacctcccgaatccctccaatccggcaactacaccccgctccactccccacccggtactaaaccgcgctggagctggtggttcaagcaatccatcatctacttcatcggcctcttgggcatgaagttctgtgtgctcatcatcttcatggtcttcccctggatttcgcgcgtgggcgactgggccctcggctggaccgagggaaacgaacgattgcaaatcatttttgtcatgatgcttttcccgctcatcatgaacgcgttgcaatactatattattgattcgtacatcaagaaggacgagaagattcctgaggaaggggcggagagtgaaggattagtcacgggacggggagatgccgaggctgcgggtgctgaggagaggggaaggggaagaggggtttatgatatcatcagtgggagtgatgatgatgcgggtagttccggggatggtgatagtgatggacaggaagatgaggaggatgagctgcccaaggacaaagctgctgagttaatggtcggtcataaaaagagggggttcaagaccaggaccaaagcagtgagggaagaggaatatgatccggcggtggatggagataccccgaccgtcattgggagtagctctagtgcggtgtcgggtgtgtcggtgaaggattga

SEQ ID NO: 68533 - protein, 556 aa, Neurospora crassa
MRLVSSSCSFSNSTFQRFKSGKLGFNNRTAETRQAHLFGTVHRSNQHYYTKPAPTVPATPPLSLSGQRRNVDIREDIPVVRIAGGTLPSHHRLRIGTVNSLHRRLGGEAAAGADTRPDYFVDPQVDTQLDDPDAQDTEPQPFETFPHVVNPPAPTGTVISVTMTPTSQPTSSTSPQPASPMAHQTDNNTECRLLGPFAILVQIALGCLALLSLVYKRWRERPQRPVKIWFFDVSKQVFGSVLVHAANVFMSMLTSGKFEIKVLDPVAVAVGTKMVKRAVEYGILSARGEDEYTPNPCSFYLLNLAIDVSQKKQTTLGIPILILIVRLLSRGLQYTPLGQPPESLQSGNYTPLHSPPGTKPRWSWWFKQSIIYFIGLLGMKFCVLIIFMVFPWISRVGDWALGWTEGNERLQIIFVMMLFPLIMNALQYYIIDSYIKKDEKIPEEGAESEGLVTGRGDAEAAGAEERGRGRGVYDIISGSDDDAGSSGDGDSDGQEDEEDELPKDKAAELMVGHKKRGFKTRTKAVREEEYDPAVDGDTPTVIGSSSSAVSGVSVKD

SEQ ID NO: 68534 - DNA, 1536 bp, Magnaporthe grisea 70-15
  CDS (1)..(1536)
atgcctaccacatgcaccacctacgtacccagattttccccaccttgcccatcgacaactccgcccacgctatactttgccgccgtgccgatcacccacactcacattcacgttcaccagcatccttcgcctctacctctgcgtttattttcaacccgagccggtgtcttgcaaccctcgagacactcccaccgctccccgtgcgcatttttcttctcgttaccccgtttgccgacaatcaataaaacgacttttgcttgccaatccttgtcagcacgcctcttcgaacgccgcagcccacccccgtccgtgaggctcggacccagcgcgccacaggtcatgcaggatttacagggcgccataataccggcggtcgctagggctgccaaagacatgtatcctcccgatgtccaagcaactgctaaagctgccatctcgacagcgttatccgccagtctcatagcgaccacgaccccgaccccgacgatgaccgctgtgactgcaacggcgacgggcagcccacacgacgggcccgagggctcgggagaatgccggctattggggtcttttgccgtcttggtgcagctggcactcggcgccctggccctactcgtgctggtctacaagaggtggagggagcgcccgcaaagaccggtcaagatctggttctttgacgcgtcgaagcaggtcttcggctcggtcttggtgcacggcgccaacgtcttcatgtcaatgttgacgtctggtcgtctttccatcaaggtggatcctgccgcggcggcggctgctaggagatggctgatgcctcggggccatggtgctgatgcagagaaatatgtgccaaatccatgctcattttacctgctcaacttggccatcgacacgacgataggaatacccatcctgatccttctcgtgcgacttacaactattcttgtttcccgtacgccgctgggcaagccatccgagtcgatacagtcgggcttctacggcaatcctcccaagtggcaatggtggctcaagcagagcataatatacttctgcggactgtttggcatgaagatatgtgtcctcataatcttcctagtgttcccctggatcagccacgtcggagactgggcactaggctggactgagggcaacgagaagctgcagattgtgttcgtcatgatgttattcccactcatcatgaacgccatgcaatattatatcatcgacagtttcatcaaagagcgcacacaagatgaagccggagacgcggccgcaaggagacctgggcttgggtctcgagaaagttcatacgaccgcctgagcgaaagtggtgacgatgaccacgaagaagagcttgcggatagaggcagcagcctcggcgaaggcaatcgcgcaaaggggggtatcaaggcgcccccccgcgatcgagaatacgaccctgagattgacggagacgatgagcgtaccgtaataggatccgccagcacatccggaaaccaacagagccaggcactgttgtcaaagggcctcttgccacacgagtag

SEQ ID NO: 68535 - protein, 511 aa, Magnaporthe grisea 70-15
MPTTCTTYVPRFSPPCPSTTPPTLYFAAVPITHTHIHVHQHPSPLPLRLFSTRAGVLQPSRHSHRSPCAFFFSLPRLPTINKTTFACQSLSARLFERRSPPPSVRLGPSAPQVMQDLQGAIIPAVARAAKDMYPPDVQATAKAAISTALSASLIATTTPTPTMTAVTATATGSPHDGPEGSGECRLLGSFAVLVQLALGALALLVLVYKRWRERPQRPVKIWFFDASKQVFGSVLVHGANVFMSMLTSGRLSIKVDPAAAAAARRWLMPRGHGADAEKYVPNPCSFYLLNLAIDTTIGIPILILLVRLTTILVSRTPLGKPSESIQSGFYGNPPKWQWWLKQSIIYFCGLFGMKICVLIIFLVFPWISHVGDWALGWTEGNEKLQIVFVMMLFPLIMNAMQYYIIDSFIKERTQDEAGDAAARRPGLGSRESSYDRLSESGDDDHEEELADRGSSLGEGNRAKGGIKAPPRDREYDPEIDGDDERTVIGSASTSGNQQSQALLSKGLLPHE

SEQ ID NO: 68536 - DNA, 1173 bp, Gibberella zeae PH-1
  CDS (1)..(1173)
atggcttcctcagttattgctacggctacctccatgaccacctctacaaccgcgtcggctacatttgtctcgtctgccccaccaacaccttatagcgaaaatggctccggcggagagtgctcattactgggctcctttgctcttgtcgtacaaggcgcactcggcgctctggcgttgctctctctcgtgtacaaacgatggagagaacgtcctcagcgacctctaaagatctggtttttcgatgtctccaagcaggtctttggttctgtgcttgtgcacatcgccaatatcttcatgtccatgttgacaagcggtcgcttttcggttcaggtcgacccgtcagcagcagccgttactgcgcgttctgatgacgactacgctcccaacccatgctctttctacctcctcaatctcgccatcgatactaccctcggtattcccatccttatcattcttctcaaggttctgactggtctcgtccgttacacgcccgtcggccaacctcccgaatctgtccagtcaggaaactatggtagcccgcccaatgttgtatggtggttgaaacaatccgtcatctacttctgtggtctatttggcatgaaggtttgcgtcctcatcatcttcatcatgatgccctggatctccaaagccggtgactgggcgcttggctggacagaaggcaatgagaagctgcagatcgcgttcgtaatgatgatcttcccactcattatgaacgctctacagtactatattatcgactccttcatcaagctcaaggaaaccgactacgaaaatgtcaatgccgatgaatctgacgaggttcgacgcaggagatatgacgacagcgaggatgagattgcgcgcgccagactggtcgattcggagcacgagactgatagcgagtcggacgacgaggtcgataagcccgccgcgcgttctgggcatccttctcgccaacccaacaccaaaaactctggggaatacgatcctgaacgcgatggtgacgatcggacgatcataggaagcagctcgagtggccggggtccaaaggacaagctaacagcgagatctatgcttaaattgcccgtgggcatctcgccaaatagcgagaacaagaagtacatcattgggttcccaaccaaaaccgacagaggatttggacccgtatcctaa

SEQ ID NO: 68537 - protein, 390 aa, Gibberella zeae PH-1
MASSVIATATSMTTSTTASATFVSSAPPTPYSENGSGGECSLLGSFALVVQGALGALALLSLVYKRWRERPQRPLKIWFFDVSKQVFGSVLVHIANIFMSMLTSGRFSVQVDPSAAAVTARSDDDYAPNPCSFYLLNLAIDTTLGIPILIILLKVLTGLVRYTPVGQPPESVQSGNYGSPPNVVWWLKQSVIYFCGLFGMKVCVLIIFIMMPWISKAGDWALGWTEGNEKLQIAFVMMIFPLIMNALQYYIIDSFIKLKETDYENVNADESDEVRRRRYDDSEDEIARARLVDSEHETDSESDDEVDKPAARSGHPSRQPNTKNSGEYDPERDGDDRTIIGSSSSGRGPKDKLTARSMLKLPVGISPNSENKKYIIGFPTKTDRGFGPVS

SEQ ID NO: 68538 - DNA, 870 bp, Candida glabrata CBS138
  CDS (1)..(870)
atgggaccgatcaaaccaggaatggataactgccagttgttggggcctgcatctttgctagttcagtgcttaatggggatttctgcactagctttgttgctatttaagagaaatcacgagcacccgaggagaaagatggagatatggctgttcgatattggcaagcaaatcatcggtgccttgggtatacattttattaatgttggcataagtgttttaaagagacatcatgaaaaaaaagcatatttatttatcagtataatagggaatctcatagagagcgtgtcttctaccagagaagatgatggttcagatgaacagtgtgactggtatttcttaaatctattactggatactaccgtggggataccaattctctggttggcgattaattgtatcacttatattctgcaatatctcaacatcaaaaacgttgaatcagggaactattttgccgaagaggagaatgatatagaatcacaagagtcagaacagccattaataactgcatttttcaaacagctaggtatttttaccagtagtttgatagttatgaaaatctgtgtatatttagtactcaactattttgaagatttagcatactggtttgctaatttaattttatcctggtcagatagatggcccgatttacaagtcactttggttatgtttgtgttccccataatattgaattgttttcaatatttttgcgtagacaacgttataaaattacattcagatgatgtaaacaactacaattcaaagagttttgaaccagaggaagtaatacaagaagaatacacaaatttgatatcgggagctcagaaaaaagataagaataaacaatcagcttacgaaaccatttcataa

SEQ ID NO: 68539 - protein, 289 aa, Candida glabrata CBS138
MGPIKPGMDNCQLLGPASLLVQCLMGISALALLLFKRNHEHPRRKMEIWLFDIGKQIIGALGIHFINVGISVLKRHHEKKAYLFISIIGNLIESVSSTREDDGSDEQCDWYFLNLLLDTTVGIPILWLAINCITYILQYLNIKNVESGNYFAEEENDIESQESEQPLITAFFKQLGIFTSSLIVMKICVYLVLNYFEDLAYWFANLILSWSDRWPDLQVTLVMFVFPIILNCFQYFCVDNVIKLHSDDVNNYNSKSFEPEEVIQEEYTNLISGAQKKDKNKQSAYETIS

SEQ ID NO: 68540 - DNA, 831 bp, Kluyveromyces lactis NRRL Y-1140
  CDS (1)..(831)
atgcaaaatgacaacgaatgtaagctattaggtccagtttctattgccatacaactgctgatggcctttctgataatatgttcgttattattgaaaagacaatcagagcatcccaagagaacgtgggtagtttggtgctacgatgttggaaaacaaatccttggtgctttgagcatacatttcttgaatgtactgattagtgtgcttaaaggaagtaattcccttgaggatgctattattttcatttttagggccggattgaaattaatgactaaggatggtggatctgactctggggacgaatgtgactggttttttttgaacctattattagataccactgtcggaataccgattctttggtgctgtctcacattttacgagtacatactgacagctataggaattgagaatatcgaaagtggcaattacttctcagaatcagaatctcattcttctacagcgaaacgtgaaccgttgttttcagcatttttgaaacagttgacggttttcatcgttagcttagcttcaatgaaagggtgtttgtttctaatacttctatatttcgaaaatgtcgcagaatggttggccaactgggtgcttggctggtccgatccatggcctaacctgcaagtgtttttggtcatgttcgttttccccttacttctaaattgtttccagtgtttctgcgttgacactattatcaaattgccagcaacgaatattactgctcagaatgtagacaatttcgatcaagaatcgttaattgagagtgatggaatatatgtcacaagaactgtttcgaataaacggtatggaacaatagtatag

SEQ ID NO: 68541 - protein, 276 aa, Kluyveromyces lactis NRRL Y-1140
MQNDNECKLLGPVSIAIQLLMAFLIICSLLLKRQSEHPKRTWVVWCYDVGKQILGALSIHFLNVLISVLKGSNSLEDAIIFIFRAGLKLMTKDGGSDSGDECDWFFLNLLLDTTVGIPILWCCLTFYEYILTAIGIENIESGNYFSESESHSSTAKREPLFSAFLKQLTVFIVSLASMKGCLFLILLYFENVAEWLANWVLGWSDPWPNLQVFLVMFVFPLLLNCFQCFCVDTIIKLPATNITAQNVDNFDQESLIESDGIYVTRTVSNKRYGTIV

SEQ ID NO: 68542 - DNA, 957 bp, Debaryomyces hansenii CBS767
  CDS (1)..(957)
atgaaatcaatacccagcattttgctaacaacattcgtggcgatatctttacaaacaactggcaataggccaaagcaccctgatgatggtgatgatgatggcaaatgtgaactaataggtacattttcacttataacacaagcgtttttgggagtgctttgtttatcttcgttaatagttaaacgattttatgagtatccgttaagaagaacgtggccagtgtggttttttgacgtgatgaagcaattaattggtgcgtttggggttcatgtgttcaatgtatttttgtcgatattgaaatccaagaaagatccaggcgtgaagtgtgctagaaataaggatgaggacgatactggtgatattgatccatgtgattggtatttcttaaatatagtattcgattgtaccataggagttttggtcttatactttgtatttaatgccattaacaggttttgtcgaaactggcttaaaatcacgcagattgaatcaggccaatatgggccaaacctggagaagccatcggttagagcgtttttaaagcaattagctgtgtattttggatcgcttatgatcaccaagatttttttatacggaatagtcgaatgctttgaaactgaattattatggataactagtcacatactattggtgtggctagatgaatatcccgacgaatttgagatattcgtcgttatgttcgttgtaccggtagtgatgaattgtctacaattagtgttggttgataatatcattcaaaaccggattatcgggaaggtcaatggacgaatgcaccatgaatatgcgggtcaatcagaagcagacgaaggtcatatccgagatgaaatcgaagagttcaccagacacggcgaccataggcacaagcgaagccgtaggcaccactctcttcccaacaacgaaggaattaaaacgtacggtacatttaatgacgtctga

SEQ ID NO: 68543 - protein, 318 aa, Debaryomyces hansenii CBS767
MKSIPSILLTTFVAISLQTTGNRPKHPDDGDDDGKCELIGTFSLITQAFLGVLCLSSLIVKRFYEYPLRRTWPVWFFDVMKQLIGAFGVHVFNVFLSILKSKKDPGVKCARNKDEDDTGDIDPCDWYFLNIVFDCTIGVLVLYFVFNAINRFCRNWLKITQIESGQYGPNLEKPSVRAFLKQLAVYFGSLMITKIFLYGIVECFETELLWITSHILLVWLDEYPDEFEIFVVMFVVPVVMNCLQLVLVDNIIQNRIIGKVNGRMHHEYAGQSEADEGHIRDEIEEFTRHGDHRHKRSRRHHSLPNNEGIKTYGTFNDV

SEQ ID NO: 68544 - DNA, 747 bp, Yarrowia lipolytica CLIB122
  CDS (1)..(747)
atgtttggaaaacacccaaagaaccctcccgggtgcaaactgctcggtccgtttgccctgatagttcaggcatcgatgggcgtgttagcggtcctaaccctggttgtgaaacgtcaatatgaagtccctcgccgtccctggtgggtgtggttctttgacgtctcgaaacagctctgtggagcggccggcttgcattttctgaatctcttcctttcgattcttacctcttcgcgcacagacgtgcccgacacgagtgataatccgtgcgactactactttctcaacgtgctaatggacactacggtcggagtgcctgttctatggggcttcctggtgctggtgaccaacattgctgagagacagttcaaggtgacggagattgaatccggagtctacggccaccctccccaatggcgggcattctggaaacaggctgggatttatcttttggccatggttttaatgaaaattgtgcttgccacgtcgttcatcatcttcccctggctggattacatcggcgccttcctactaaagtggactgataacaatcccgatctccaggtggcgtttgtcatgctcatctttcctctcttcatgaatgctctgcaatattatctgatcgacaacattatagagagcaactcgttccgacaggactaccacagtgttcccaacattggcgaggtggatgcccccgagcgaattccccaacagctggcccagagtagttatcataccttcaagtaa

SEQ ID NO: 68545 - protein, 248 aa, Yarrowia lipolytica CLIB122
MFGKHPKNPPGCKLLGPFALIVQASMGVLAVLTLVVKRQYEVPRRPWWVWFFDVSKQLCGAAGLHFLNLFLSILTSSRTDVPDTSDNPCDYYFLNVLMDTTVGVPVLWGFLVLVTNIAERQFKVTEIESGVYGHPPQWRAFWKQAGIYLLAMVLMKIVLATSFIIFPWLDYIGAFLLKWTDNNPDLQVAFVMLIFPLFMNALQYYLIDNIIESNSFRQDYHSVPNIGEVDAPERIPQQLAQSSYHTFK

SEQ ID NO: 68546 - DNA, 1476 bp, Cryptococcus neoformans var. neoformans JEC21
  CDS (1)..(1476)
atgcttccggacaactccacaatcatagacccagtagggccgccgcacacgcccacagacacgcccgcagacccgcagagatgcaagctgctcgggacaacaggcctcgtagtgcaggcactcatgggcatcctcgtcatcgcttctttggtcgttaaaaaacggctcgaaaagaggaaacgttcatggcgtatttggttcctcgacgtcagcaagcaactcgtcgggcaggccgtcgtccatgcgctcaacttattaatatcagatctggtagcgtcagtggggaacagcaatccatgttcattatattttctaaacattctcatcgacaccactattggtgtcggaatcatctttctcagtctcaaattctttacatggctcttttcaagctacctcggttatgacggattcatcagcggtaaatatggaaaccctcctcaagccctcttttggtggaaacaactactcacctacgtattttccatcatcatcatgaaactcctcgtcctcctcccactcacgcttccacgcatctctgaccttcttctccatttgggccactacatgctcgagtacttctctccctccgtgcaggtcattttcgtcatggccatcttccccttgatcatgaacattgtccagttttgtctggtcgaccaggtcatcaaggccggcggtaaagccgacgatgaggaaggccgaatacatgatacaggggatgaagaggaagggtatagcagagtacctgactgggagaatgatttggatggacatggacgcaggagcggagaagggtcaccaagggaaatgacgaagaaggaggaggaggagacgacggcaagagcgaccggtatatccacagccttaccgccatcatcgcctcttctctcacccgctcgttatgacggttatggaagtaccacacctagtcccgtggggagcccaacgaaatctgtcgaggggcagaatatgtggacaaagatgatgagtaagagtaaggatacaggtggcggtagtagtaataatgccagtttgaaggagagacatggggtaaacagtagaaagtctagtaatacatggtgggagtatccggacgacgaagacgaagacggcggaggagggctggaagctcccatacagcgtaatactcgatctcacgccccttcgccagaatcagtatatccagcagaattacctcctccatttgtggtaaacggcagctcggcggctgcttttcgcaagaattcacggacgccgccggaatggggcgcgtcatccacacactcttctcatactgctcgacgattgacatcagaagtcgagcgggaggcaagactgacgttgagcccgccgcggtcgcctagggtagagaatagtagtagtagtggtggtggtggtggtggtggtggtggtggtggtaatgggcggtcggaaagaggggaggaagttggtttggatgtcttacggaggtga

SEQ ID NO: 68547 - protein, 491 aa, Cryptococcus neoformans var. neoformans JEC21
MLPDNSTIIDPVGPPHTPTDTPADPQRCKLLGTTGLVVQALMGILVIASLVVKKRLEKRKRSWRIWFLDVSKQLVGQAVVHALNLLISDLVASVGNSNPCSLYFLNILIDTTIGVGIIFLSLKFFTWLFSSYLGYDGFISGKYGNPPQALFWWKQLLTYVFSIIIMKLLVLLPLTLPRISDLLLHLGHYMLEYFSPSVQVIFVMAIFPLIMNIVQFCLVDQVIKAGGKADDEEGRIHDTGDEEEGYSRVPDWENDLDGHGRRSGEGSPREMTKKEEEETTARATGISTALPPSSPLLSPARYDGYGSTTPSPVGSPTKSVEGQNMWTKMMSKSKDTGGGSSNNASLKERHGVNSRKSSNTWWEYPDDEDEDGGGGLEAPIQRNTRSHAPSPESVYPAELPPPFVVNGSSAAAFRKNSRTPPEWGASSTHSSHTARRLTSEVEREARLTLSPPRSPRVENSSSSGGGGGGGGGGGNGRSERGEEVGLDVLRR

SEQ ID NO: 68548 - DNA, 1284 bp, Bos taurus
  CDS (1)..(1284)
atgtgtctccccagttttccatttctcaccacccccaaaccgaaaccagaagtgcagtggaaccatttctggagggtgaaagttcaggccaagatgttggccagcttcgtttctcctgaggcctctctccttggcttgaaggtggccgtcttctcaccgtgtcctctcacggtcacctgtcagtctactgggggctggctgtatttatttagagaagtagggcttattgattcggcaccggtttctccctcgctgcctccttcctcttcgtgcatcctcattgcagtttgggactctgccagaagtcgattcttgcctgctaccatcgtgtctatttcttcctcagtactttgtataggaaaatcccacacacatggcacttgcattgtttgttttagtagagtcattgtggaaatagtctgcctgaggcttcagcggaggacaggacacttagaacatttttgcttccgtctgtataagcggttgtgtttgcagacccgcctgaggtcaagatgtcagtctggggagccctttgtcatccatcgtggtcaggctgttgtcaaacgcttcagagaaccaaagcatgaaagacgaccatggaggatatggtttttagacacttccaaacaagccataggaatgctgttcatccattttgcaaatgtatacctagcagatctcaacgaagaggacccttgttcactgtacctcatcaacttcctcctggatgccaccgtgggcatgctcctcatctacgtgggtgtgcgcgccgtcagcgtcctggtggaatggcagcagtgggagtccctgcgttttggcgaatacggagaccctctgcagtgtggagcctgggttggacaatgtgccctttacatcgtgatcatgatttttgaaaaatctgtcgttttcatcgtcctcctaatacttcagtggaagaaggtggccctgttgaatcccattgaaaacccagacttgaagctggccatcgtcatgctgatcgtccccttctttgtcaatgctctgatgttttgggtagtggacaatttcctcatgagaaagggaaggacgaaagctaagctagaagaaagaggagccaaccaggactcaaggaacgggagcaaggtccgctaccgaagggccgcgtcccatgaggagtcagagtctgagatcctgatctcagccgatgacgagatggaggagtcggacgtggaggaggacctccggagactgacgcccctgaagcctgtgaagaaaaagaagcaccgcttcgggctgcctgtatga

SEQ ID NO: 68549 - protein, 427 aa, Bos taurus
MCLPSFPFLTTPKPKPEVQWNHFWRVKVQAKMLASFVSPEASLLGLKVAVFSPCPLTVTCQSTGGWLYLFREVGLIDSAPVSPSLPPSSSCILIAVWDSARSRFLPATIVSISSSVLCIGKSHTHGTCIVCFSRVIVEIVCLRLQRRTGHLEHFCFRLYKRLCLQTRLRSRCQSGEPFVIHRGQAVVKRFREPKHERRPWRIWFLDTSKQAIGMLFIHFANVYLADLNEEDPCSLYLINFLLDATVGMLLIYVGVRAVSVLVEWQQWESLRFGEYGDPLQCGAWVGQCALYIVIMIFEKSVVFIVLLILQWKKVALLNPIENPDLKLAIVMLIVPFFVNALMFWVVDNFLMRKGRTKAKLEERGANQDSRNGSKVRYRRAASHEESESEILISADDEMEESDVEEDLRRLTPLKPVKKKKHRFGLPV

SEQ ID NO: 68550 - DNA, 1113 bp, Aspergillus nidulans FGSC A4
  CDS (1)..(1113)
atggcttatgcatccatcccgttgttttctgcggcgatcctcgtatccgccctcgacatcggggtaaatgctctggtctctccgaccggcgtcattacaacaccatcaccatctttgtcaacaccggccgcatcgtactccccaacgagttccagttcttccggacatgacgaagacaatggagaatgccggctacttgggccgttttcgctcgtcgtgcaggccgccctgggaatgctcgcgttattgtcgcttgtctacaagcgatggagagaacgccctcaacgcccggtgaaggtctgggcgttcgatgcctcgaagcaagttttcggttcatctatgctacatctctttaaccttttgatgtccatgttctctgccggacagtttgagatcacaagcaaatacaagccaaacccatgctcgttttacttgctaaatcttggcatcgataccaccctaggtatccctatcttgatcgttatactccatgtcttgaaccgcttggcgaaatacacccccctcgcaaatcctccggaatcgatcgaatctgggaattatgacgatcccccccgtgtcagctggtggtttaagcaatccatgatctactttctgggtcttctgggaatgaaaatttgtgtcttcttcctcatccagatggtgccgcttatcgttaaggtaggcgactgggctttgcgatggactgaaggcaacaccgccatccagatcatcttcgtgatgctcatcttccccgtcataatgaatgctattcagtattatattatcgatattttcataaagaagccactctccgtgtctcacgacctcgagagtgccgataccgcaagcgacaacgacgccgacgaccggcatgcattgctggccggattggaggatgatgatacatttgaccgtgatgggtcgctaggaagtgacgaaagaacgttacatagccccgtgcagtttaaggaagctctggaccatctgaatgctgctaaaagagatccggtgggttctctggactctgcatcaacgccaacctccagtagcgcacgcgaaaacgatgacacgactttgtctacagaaatcaatgtgcaaccgaaagatatgtaa

SEQ ID NO: 68551 - protein, 370 aa, Aspergillus nidulans FGSC A4
MAYASIPLFSAAILVSALDIGVNALVSPTGVITTPSPSLSTPAASYSPTSSSSSGHDEDNGECRLLGPFSLVVQAALGMLALLSLVYKRWRERPQRPVKVWAFDASKQVFGSSMLHLFNLLMSMFSAGQFEITSKYKPNPCSFYLLNLGIDTTLGIPILIVILHVLNRLAKYTPLANPPESIESGNYDDPPRVSWWFKQSMIYFLGLLGMKICVFFLIQMVPLIVKVGDWALRWTEGNTAIQIIFVMLIFPVIMNAIQYYIIDIFIKKPLSVSHDLESADTASDNDADDRHALLAGLEDDDTFDRDGSLGSDERTLHSPVQFKEALDHLNAAKRDPVGSLDSASTPTSSSARENDDTTLSTEINVQPKDM

SEQ ID NO: 68552 - DNA, 678 bp, Danio rerio
  CDS (1)..(678)
atgtttgtttttgtgaaagacagcattaatatgactgatttggtgagcccggagtatcagggctgcgtggacggagctctgatggacggattcagtgtttttatacaggctctgttggcggttctggctttcagcactttaatgttgaagaggtttcgtgaacctgttggaataagaagaccttggaagatctggttctttgacacttctaaacaagcggtcggggctcttttcatgcattttgccaacatattcctttccacactcaccaatgaagatccctgctctctatatttgctgaacttcttgttggatgccacattgggaatgcttgtgatctgggtgggagtgaaagttgtttccaaaatagtggaacataaacagataacactgctaatgttcggagaatatggtgatcctcctcgagtcttggcatgggtggctcagtgttcagtgtatttactcatcgttgctctggagaaaagtgtggtctctctggtgctgctcattcctggatggaccaatacctggctgcccgaattgctgggtattgaaactaaacacggcactatcaaaatggattgggctcatagaacccttggtccgctcaagcccaagcgaacacgccctgtggtgatgaagctactcagacaaggccaaaacactagcagctgctaa

SEQ ID NO: 68553 - protein, 225 aa, Danio rerio
MFVFVKDSINMTDLVSPEYQGCVDGALMDGFSVFIQALLAVLAFSTLMLKRFREPVGIRRPWKIWFFDTSKQAVGALFMHFANIFLSTLTNEDPCSLYLLNFLLDATLGMLVIWVGVKVVSKIVEHKQITLLMFGEYGDPPRVLAWVAQCSVYLLIVALEKSVVSLVLLIPGWTNTWLPELLGIETKHGTIKMDWAHRTLGPLKPKRTRPVVMKLLRQGQNTSSC

SEQ ID NO: 68554 - DNA, 1023 bp, Candida albicans SC5314
  CDS (1)..(1023): transl_table=12
atgggttgtggagaactactatctgttccacttgtatttttatcattattttctcatgaaaatgtccctgttttaaacactggcacaacagatgatgatgggaaatgtgaattaattgggacattttcgttaatgactcaagccatattaggaatgttatgtctttcttcattattaattaaaagattttatgaatatcccatacgacgaacttggccagtttggatatttgatgtatcaaaacaattgattggagcattaggagttcatatatttaatgtgattttatcaatggttaaaactgcccctgagatttggtcaacccagaacaacaacaacagtagcgatcctgatgatgataacacgaaagatccttgtgattggtattttttgaatattgttcttgattgtactattggagtatatatcttatatcatgtatttaaaaccatgaataaaatatgtcgagattattggcatattacacagattgaaagtggtgaatatggaccaaatcccaataaaccatcaaccaaagcattcctcaagcaattaattgtttatttcacttctttgatgattacaaaaattatattatatggattagttgaatgttttgaaacgcaattattatggtttacatctcatgtattattaatttggttaaatgaataccctgatgaatttgaaatttttatcgtgatgtttattgtcccaataattatgaattgtttacaattaatacttattgataattttattagaaatcaaatgtggattaacattaataaacgaatgagaatagaatttcctaattttagtgatgaaacagaaagtgttcaacaacaagatattatccaagcacaaagagaagaggaagaggaagaagaacaaaggaaataccttttaatgaatgatagtactgaaggtggtaacaacaatcatagtagcagtagtagtaatgatactttactaggagaatctcacaataaaaacaattatggctcttataatgatgtatag

SEQ ID NO: 68555 - protein, 340 aa, Candida albicans SC5314
MGCGELLSVPLVFLSLFSHENVPVLNTGTTDDDGKCELIGTFSLMTQAILGMLCLSSLLIKRFYEYPIRRTWPVWIFDVSKQLIGALGVHIFNVILSMVKTAPEIWSTQNNNNSSDPDDDNTKDPCDWYFLNIVLDCTIGVYILYHVFKTMNKICRDYWHITQIESGEYGPNPNKPSTKAFLKQLIVYFTSLMITKIILYGLVECFETQLLWFTSHVLLIWLNEYPDEFEIFIVMFIVPIIMNCLQLILIDNFIRNQMWININKRMRIEFPNFSDETESVQQQDIIQAQREEEEEEEQRKYLLMNDSTEGGNNNHSSSSSNDTLLGESHNKNNYGSYNDV

SEQ ID NO: 68556 - DNA, 1023 bp, Candida albicans SC5314
  CDS (1)..(1023): transl_table=12
atgggttgtggagaactactatctgttccacttgtatttttatcattattttctcatgaaaatgtccctgttttaaacactggcacaacagatgatgatgggaaatgtgaattaattgggacattttcgttaatgactcaagccatattaggaatgttatgtctttcttcattattaattaaaagattttatgaatatcccatacgacgaacttggccagtttggatatttgatgtatcaaaacaattgattggagcattaggagttcatatatttaatgtgattttatcaatggttaaaactgccccagagatttggttaacccagaacaacaacaacagtagcgatcctgatgatgataacacgaaagatccttgtgattggtattttttgaatattgttcttgattgtactattggagtatatatcttatatcatgtatttaaaaccatgaataaaatatgtcgagattattggcatattacacagattgaaagtggtgaatatggaccaaatcccaataaaccatcaaccaaagcattcctcaagcaattaattgtttatttcacttctttgatgattacaaaaattatattatatggattagttgaatgttttgaaacgcaattattatggtttacatctcatgtattattaatttggttaaatgaataccctgatgaatttgaaatttttatcgtgatgtttattgtcccaataattatgaattgtttacaattaatacttattgataattttattagaaatcaaatgtggattaacattaataaacgaatgagaatagaatttcctaattttagtgatgaaacagaaagtgttcaacaacaagatattatccaagcacaaagagaagaggaagaggaagaagaacaaaggaaataccttttaatgaatgatagtactgaaggtggtaacaacaatcatagtagcagtagtagtaatgatactttactaggagaatctcacaataaaaacaattatggctcttataatgatgtatag

SEQ ID NO: 68557 - protein, 340 aa, Candida albicans SC5314
MGCGELLSVPLVFLSLFSHENVPVLNTGTTDDDGKCELIGTFSLMTQAILGMLCLSSLLIKRFYEYPIRRTWPVWIFDVSKQLIGALGVHIFNVILSMVKTAPEIWLTQNNNNSSDPDDDNTKDPCDWYFLNIVLDCTIGVYILYHVFKTMNKICRDYWHITQIESGEYGPNPNKPSTKAFLKQLIVYFTSLMITKIILYGLVECFETQLLWFTSHVLLIWLNEYPDEFEIFIVMFIVPIIMNCLQLILIDNFIRNQMWININKRMRIEFPNFSDETESVQQQDIIQAQREEEEEEEQRKYLLMNDSTEGGNNNHSSSSSNDTLLGESHNKNNYGSYNDV

SEQ ID NO: 68558 - DNA, 1110 bp, Aspergillus fumigatus Af293
  CDS (1)..(1110)
atgtctctcccgtctatgacttcactggcggcggcggctacagccatcgcagtaatgagcagtagcgtcccaacatcatcacccacaccttcaatacctagaccttcttccatggccggtccgcatcatgatcctgatggggaagataatggagaatgcaggctgttgggtcccttttcgattctcgtccaagcggctctcggatccctggcgctgttgtccttagtatacaaacgctggagggagagaccccagcggcctgtgaaggtgtgggcatttgatgtatcaaaacaagtctttgggtcggcaatgctacatcttgcgaatctactcatgtccatgttctcagccggccagttcgaaatcacgagcaaatacagaccgaatccatgctctttctatctattaaatttggggattgatactacactcggaatccccattctcatcttcatcctccacattctaaaccgcctagcggcatatactccccttgcgaatcccccggaatcaatagagtctggaaactatggcgcgccaccacgggccgcctggtggttcaagcaggctatgatatacttcttcgggcttttgggaatgaaaatatgcgtcttctttctcatccaactactgccattcatagtcaagataggtgactgggctctgcgctggacggaagggaacacagctctgcagatcatcttcgtcatgctgcttttcccagtgatcatgaacgcgatccagtactacatcatcgatactttcatcaaaagaccgctatctcgaactcacgagctgctccaggaagacgatgaagtagaagatgctttgttggatgacggtcggacaccgcacaatgcactgctgtctagcgctgaggatgctgatacatttgggccggatgaaggtattataggaaaggatttgggcaaaactcttgaaccgcctgcagggccgaacggttttcgtcatgtcgagtacgatccagcagttgatggagagtatttctccccggcgtcatcaacgtctgccagctccagcagcagtcatggcgaatatgatgcaatgtcatcttcgacaaagcttacacctcagaacaagagaccatga

SEQ ID NO: 68559 - protein, 369 aa, Aspergillus fumigatus Af293
MSLPSMTSLAAAATAIAVMSSSVPTSSPTPSIPRPSSMAGPHHDPDGEDNGECRLLGPFSILVQAALGSLALLSLVYKRWRERPQRPVKVWAFDVSKQVFGSAMLHLANLLMSMFSAGQFEITSKYRPNPCSFYLLNLGIDTTLGIPILIFILHILNRLAAYTPLANPPESIESGNYGAPPRAAWWFKQAMIYFFGLLGMKICVFFLIQLLPFIVKIGDWALRWTEGNTALQIIFVMLLFPVIMNAIQYYIIDTFIKRPLSRTHELLQEDDEVEDALLDDGRTPHNALLSSAEDADTFGPDEGIIGKDLGKTLEPPAGPNGFRHVEYDPAVDGEYFSPASSTSASSSSSHGEYDAMSSSTKLTPQNKRP

SEQ ID NO: 68560 - DNA, 1326 bp, Ustilago maydis 521
  CDS (1)..(1326)
atgagcgcctccgacactggcttcgtcggtatggtcggtgtcgtacgtgacatgatgccgccaactgcatccatagcggctttggcgtccgacccgaccttgacccccacgcctacgccgatcatcggcgctccggaagtggacggagacaactgcaaacttatgggtccctttgcgctgttcgtacaggccgtcatgggcatcctcgtcataggctctctcgtttacaaacgacagagagaaaagccgaaacgcaaatggaaaatctgggcgctcgacgtttctaagcagatgctcggccaactctttgttcacatcctcaatatcgtcctttcggactttgttgccagcggaggaggtgaaaacccttgctcgctctactttctcaacatcctcgtcgataccactttgggcgtattcttcatctacatcgccttgaagtacgtcacgtatttcctcaccgaacgactcggcttggagggcttcatatccggtcaatacactccaccgctacctagcattgttcctgcatcatccaccggtcccagcacatcggcgcagtccggttcttcgcgcagggcattccgcagaggcagacccaggatcgagtactggttgaagcagctggcttcgtacctttttgtgctcttcctcatgaagatggcggtgcttgttgtctttggcttctttccattcctctttgacgtgggctcatggatcttgggcttctttggtagcaacaaggacttccaagtgctgttctcgatggccttattcccgctcgctatgaacgtattgcagttctggctcatcgattccctcctccgccacaatccttacacatcggcttactccaagatcaatccggacgaccaagaatttctcaacagctctgatagtatctctcacgagtctcgccaacctgccgaggatgtcggcggtcgcacacattcaataggggaagatagcgacgacgaaacaaacgacctagataaacagcacattcaaccgtacgcttctggcccaggccgatccagacgaaggccttccccacagaggtctgtcacctcggatcagccttacgactatcctccaccgacagatttgtacggctcagtgcacaagtcgcctcctctgaggccctctagacctacggacgacatgcgacgccaagctagcctgacgctttcggatgctggctcggatacagaatcgggtagtcagagcatacaccagactctgtttaatagcaaagcctctctacaaccgtctgagacgcaccatctcaaacaggtcagcagagacggcagcagcagcagcagctga

SEQ ID NO: 68561 - protein, 441 aa, Ustilago maydis 521
MSASDTGFVGMVGVVRDMMPPTASIAALASDPTLTPTPTPIIGAPEVDGDNCKLMGPFALFVQAVMGILVIGSLVYKRQREKPKRKWKIWALDVSKQMLGQLFVHILNIVLSDFVASGGGENPCSLYFLNILVDTTLGVFFIYIALKYVTYFLTERLGLEGFISGQYTPPLPSIVPASSTGPSTSAQSGSSRRAFRRGRPRIEYWLKQLASYLFVLFLMKMAVLVVFGFFPFLFDVGSWILGFFGSNKDFQVLFSMALFPLAMNVLQFWLIDSLLRHNPYTSAYSKINPDDQEFLNSSDSISHESRQPAEDVGGRTHSIGEDSDDETNDLDKQHIQPYASGPGRSRRRPSPQRSVTSDQPYDYPPPTDLYGSVHKSPPLRPSRPTDDMRRQASLTLSDAGSDTESGSQSIHQTLFNSKASLQPSETHHLKQVSRDGSSSSS

SEQ ID NO: 68562 - DNA, 861 bp, Strongylocentrotus purpuratus
  CDS (1)..(861)
atggcaatgcccacaaatgaatcgtccactgaccactgcaaaccggaaaatttcacagatcgttttggaatgctcgagcaagggattcttgcatttcttgccttcagttttttgatacttaagagactaagagaacccaaggatgagagaaggccttggaagatttggtttttcgatacctccaaacaggctcttggtgctggcctgatccatgtcttcaacattctattgtcaatgatttccgtgagaggagatgcctgtacttggtatgtcatatacttcttactggactccaccgccgggctcttgttcatctacctacaagtgagaatcgcccagaggatctttataaggtgtgcatgcaaggcactgatgtttggagagtacggggaccctcccaaatgggatgcttggatcggacagtgtggtgtcttcatcatcatcgtcatcatagaaaagattggcatcactctacttacgtttattccattctggacaaaggtcgctgaaatcttactgagtcctatacataatcctaaagtagagttgacattggtgatgctcatcataccattcattgtgaacacaattatgttctgggtgattgataacctcttgatgggaaagaggtcaaagttgaaaggtcacgacaaggagagtcggggcttgaacgggaaagaccggaagcagagagtgcattactaccgcagcgtgccaggaaagtcgtcggacggatcagagtcagaggttctggtctcatgtgatgatgacgacaccaaggcatcgaacgggtcgctattggtcagagagccagaagaggagaggttgagtgggaagagaataaaagaaaattatttatag

SEQ ID NO: 68563 - protein, 286 aa, Strongylocentrotus purpuratus
MAMPTNESSTDHCKPENFTDRFGMLEQGILAFLAFSFLILKRLREPKDERRPWKIWFFDTSKQALGAGLIHVFNILLSMISVRGDACTWYVIYFLLDSTAGLLFIYLQVRIAQRIFIRCACKALMFGEYGDPPKWDAWIGQCGVFIIIVIIEKIGITLLTFIPFWTKVAEILLSPIHNPKVELTLVMLIIPFIVNTIMFWVIDNLLMGKRSKLKGHDKESRGLNGKDRKQRVHYYRSVPGKSSDGSESEVLVSCDDDDTKASNGSLLVREPEEERLSGKRIKENYL

SEQ ID NO: 68564 - DNA, 876 bp, Canis familiaris
  CDS (1)..(876)
atgcgaatcgcagcaacccctggagaggtggtcaccctggccatgaggctgaggagatctgacctcatgcccatactcctgctgctcaaaggcccagcccctccacctgagagctcttccaccgactcctgtgactctcccctccctttcctcaagcgcttcagagaaccaaagcatgagagacggccgtggaggatatggtttttagacacttccaaacaagccataggaatgctgttcatccactttgcaaatgtgtacctagcagatcttactgaagaggacccttgctcactgtacctcatcaacttcctcctggatgccaccgtgggcatgctgctcatctacgtgggtgtgcgtgctgtcagtgtcttggtggagtggcagcagtgggagtccctgcgctttggcgaatatggagaccctctgcagtgcggagcctgggttgggcagtgtgctctttacatcgtgatcatgatttttgaaaagtctgtcgtcttcatcgtcctccttatacttcagtggaaaaaggtggccctattgaatcccattgaaaacccagacctgaaactggccatcgtcatgctgatcgtccccttctttgtcaatgctttgatgttttgggtagtggataatttcctcatgagaaaagggaggacgaaagctaaactagaagaaaggggagccaaccaggactcgaggaatgggagcaaagtccgctatcgaagggctgcatcccacgaggagtcagagtctgagatcctgatctcagccgatgacgagatggaggagtccgatgtggaggaggacctgcgcagactgacccctctgaagcctgcgaagaaaaagaaacaccgttttgggctgcccgtatga

SEQ ID NO: 68565 - protein, 291 aa, Canis familiaris
MRIAATPGEVVTLAMRLRRSDLMPILLLLKGPAPPPESSSTDSCDSPLPFLKRFREPKHERRPWRIWFLDTSKQAIGMLFIHFANVYLADLTEEDPCSLYLINFLLDATVGMLLIYVGVRAVSVLVEWQQWESLRFGEYGDPLQCGAWVGQCALYIVIMIFEKSVVFIVLLILQWKKVALLNPIENPDLKLAIVMLIVPFFVNALMFWVVDNFLMRKGRTKAKLEERGANQDSRNGSKVRYRRAASHEESESEILISADDEMEESDVEEDLRRLTPLKPAKKKKHRFGLPV

SEQ ID NO: 68566 - DNA, 867 bp, Mus musculus
  CDS (1)..(867)
atgcaaggcccgggagggaacgtgagccgcggattgccgagcgggccggcctccacggtcgcgtccggggcgggccgctgtgagagcggcgcgctcatgcacagtttcggcatcttcctgcaggggctgctcggcgtcgtggccttcagcacattgatgcttaaacgcttcagagaaccaaagcatgaaagacggccgtggaggatatggtttttagacacttccaaacaagccatagggatgctcttcatccactttgcaaatgtgtacctagcagatctcactgaagaggacccttgttcactgtacctcatcaactttcttctggacgccactgtaggcatgctgctcatttatgtgggcgtacgcgccgtcggtgtcttggtggagtggcagcagtgggaatccctgcgttttggagaatatggagaccctctgcagtgcggggcctgggtagggcagtgcgccctctacatcgtgatcatgatctttgaaaagtccgtggtcttcatcgtcctcctcatactccagtggaaaaaggtggccctattgaatccaattgaaaaccccgacctgaagctggccatcgtcatgctgatagtccccttctttgtcaatgctttcatgttctgggtagtggacaatttcctcatgagaaaggggaagacgaaagctaaactagaaggaagaggagccaaccaggactcaaggaatgggagcaaggttcgctaccgaagggcagcatcccatgaggagtctgagtctgagatcctgatctcagctgacgacgagatggaggagtctgacgccgaggaggacctccggagacctgtgaaaaagaagcaccgcttcgggctgcctgtatga

SEQ ID NO: 68567 - protein, 288 aa, Mus musculus
MQGPGGNVSRGLPSGPASTVASGAGRCESGALMHSFGIFLQGLLGVVAFSTLMLKRFREPKHERRPWRIWFLDTSKQAIGMLFIHFANVYLADLTEEDPCSLYLINFLLDATVGMLLIYVGVRAVGVLVEWQQWESLRFGEYGDPLQCGAWVGQCALYIVIMIFEKSVVFIVLLILQWKKVALLNPIENPDLKLAIVMLIVPFFVNAFMFWVVDNFLMRKGKTKAKLEGRGANQDSRNGSKVRYRRAASHEESESEILISADDEMEESDAEEDLRRPVKKKHRFGLPV

SEQ ID NO: 68568 - DNA, 867 bp, Mus musculus
  CDS (1)..(867)
atgcaaggcccgggagggaacgtgagccgcggattgccgagcgggccggcctccacggtggcgtccggggcgggccgctgtgagagcggcgcgctcatgcacagtttcggcatcttcctgcaggggctgctcggcgtcgtggccttcagcacattgatgcttaaacgcttcagagaaccaaagcatgaaagacggccgtggaggatatggtttttagacacttccaaacaagccatagggatgctcttcatccactttgcaaatgtgtacctagcagatctcactgaagaggacccttgttcactgtacctcatcaactttcttctggacgccactgtaggcatgctgctcatttatgtgggcgtacgcgccgtcggtgtcttggtggagtggcagcagtgggaatccctgcgttttggagaatatggagaccctctgcagtgcggggcctgggtaggacagtgcgccctctacatcgtgatcatgatctttgaaaagtccgtggtcttcatcgtcctcctcatactccagtggaaaaaggtggccctattgaatccaattgaaaaccccgacctgaagctggccatcgtcatgctgatagtccccttctttgtcaatgctttcatgttctgggtagtggacaatttcctcatgagaaaggggaagacgaaagctaaactagaagaaagaggagccaaccaggactcaaggaatgggagcaaggttcgctaccgaagggcagcatcccatgaggagtctgagtctgagatcctgatctcagctgacgacgagatggaggagtctgacgccgaggaggacctccggagacctgtgaaaaagaagcaccgcttcgggctgcctgtatga

SEQ ID NO: 68569 - protein, 288 aa, Mus musculus
MQGPGGNVSRGLPSGPASTVASGAGRCESGALMHSFGIFLQGLLGVVAFSTLMLKRFREPKHERRPWRIWFLDTSKQAIGMLFIHFANVYLADLTEEDPCSLYLINFLLDATVGMLLIYVGVRAVGVLVEWQQWESLRFGEYGDPLQCGAWVGQCALYIVIMIFEKSVVFIVLLILQWKKVALLNPIENPDLKLAIVMLIVPFFVNAFMFWVVDNFLMRKGKTKAKLEERGANQDSRNGSKVRYRRAASHEESESEILISADDEMEESDAEEDLRRPVKKKHRFGLPV

SEQ ID NO: 68570 - DNA, 720 bp, Tetraodon nigroviridis
  CDS (1)..(720)
atggacgcgtaccgcaggctcctcgcggagacgaggctcgtgggcaggggtgttttggaggggaccaacatgtcggaggtcagcaaggccgaccctcacggctgcgataacggagctctgaccgacaggttcggggtgctgatccagggtctgctggccgtcgtcgccttcagcactctcatggtgaagaggttccgagagccggcagatatccgacgaccctggaggatctggttctttgacacgtccaaacaggccattggctccctcttcatccactttgccaacatcttcctctccacgctcaccaaagaggacccgtgctccctgtacctgatgaactttctgttggacgccaccctggggatgctggtcatctgggtggctgtgaaactggtgtccaaactggtggagcacaaacagtggagcctcctcgtgtttggggaatacggcgaccccccgcaggcggccgcctggctgggccagtgcggcgtctacctgctcatcatggtgctggagaaaggtgtgatcagcctgacgctgctggtccccggctggtccaaactgcaggaggtgttgctaagctacatcgctaaccctcagctggagctggcgctggtcatgctcatcgtgcccttcatcgtcaactccatcatgttctgggtggtcgacagtctgacgatgaggaagaacaagatgacgaagagcttggatgattag

SEQ ID NO: 68571 - protein, 239 aa, Tetraodon nigroviridis
MDAYRRLLAETRLVGRGVLEGTNMSEVSKADPHGCDNGALTDRFGVLIQGLLAVVAFSTLMVKRFREPADIRRPWRIWFFDTSKQAIGSLFIHFANIFLSTLTKEDPCSLYLMNFLLDATLGMLVIWVAVKLVSKLVEHKQWSLLVFGEYGDPPQAAAWLGQCGVYLLIMVLEKGVISLTLLVPGWSKLQEVLLSYIANPQLELALVMLIVPFIVNSIMFWVVDSLTMRKNKMTKSLDD

SEQ ID NO: 68572 - DNA, 837 bp, Brachydanio rerio
  CDS (1)..(837)
atgtttgtttttgtgaaagacagcattaatatgactgatttggtgagcccggagtatcagggctgcgtggacggagctctgatggacggattcagtgtttttatacaggctctgttggcggttctggctttcagcactttaatgttgaagaggtttcgtgaacctgttggaataagaagaccttggaagatctggttctttgacacttctaaacaagcggtcggggctcttttcatgcattttgccaacatattcctttccacactcaccaatgaagatccctgctctctatatttgctgaacttcttgttggatgccacattgggaatgcttgtgatctgggtgggagtgaaagttgtttccaaaatagtggaacataaacagataacactgctaatgttcggagaatatggtgatcctcctcgagtcttggcatgggtggctcagtgttcagtgtatttactcatcgttgctctggagaaaagtgtggtctctctggtgctgctcattcctggatggaccaatttggaggaggtggtgctggattacatcccaaacccacagctggagctggccatcgtcatgcttatcgtgcctttcatagtcaactctataatgttctgggtggtggacagtttaacaatgcgcaaatataagaagatgacgtctctggaaggctcacgcgactctccgaaacaagtagacgctttgccagatgagagcaatgatgaagctgaggtgctgctaaagaaagatgatgaagcagcggtgtgttctgaagaggaagatcacgtcacaacagaagaagccttaatacgagtcagcatggaggtttaa

SEQ ID NO: 68573 - protein, 278 aa, Brachydanio rerio
MFVFVKDSINMTDLVSPEYQGCVDGALMDGFSVFIQALLAVLAFSTLMLKRFREPVGIRRPWKIWFFDTSKQAVGALFMHFANIFLSTLTNEDPCSLYLLNFLLDATLGMLVIWVGVKVVSKIVEHKQITLLMFGEYGDPPRVLAWVAQCSVYLLIVALEKSVVSLVLLIPGWTNLEEVVLDYIPNPQLELAIVMLIVPFIVNSIMFWVVDSLTMRKYKKMTSLEGSRDSPKQVDALPDESNDEAEVLLKKDDEAAVCSEEEDHVTTEEALIRVSMEV

SEQ ID NO: 68574 - DNA, 621 bp, Xenopus laevis
  CDS (1)..(621)
atggggacgagcaatggcagcaagagcctgaccccggggccgtcccctcccgaccccagccccactgctccgggctgtggcaacggggcaatgatgggctctttcgggatcttcttgcaaggcctgctggctgtgatggctttcagcatcctcatgttaaaacgccttcgagaaccaaagcatgaaagacgtccttggaaaatctggttcttggacacatccaagcaagctatagggatgctgtttatccattttgcaaatgtctacttgtcggaccttactggggaagacccttgctctatatatcttattaactttctcctggacgctacattggggatgttgcttatctatattggtgttcgagtggtgagttgcatcgtggagtggaggcagtgggagtccctgcgattcggcgaatatggtgatcctgtgcagtgcaaagcctgggttgggcagtgtgccctctacattgtcattatgatgttcgagaaaacagccatcgtccttgtcttgctcatcccgcatctcaaagaggttgccaaggtaaaacctataaaaaatcctcaactggagcttgcaactgtcatgctgattgttccatttttgttaatgcattaa

SEQ ID NO: 68575 - protein, 206 aa, Xenopus laevis
MGTSNGSKSLTPGPSPPDPSPTAPGCGNGAMMGSFGIFLQGLLAVMAFSILMLKRLREPKHERRPWKIWFLDTSKQAIGMLFIHFANVYLSDLTGEDPCSIYLINFLLDATLGMLLIYIGVRVVSCIVEWRQWESLRFGEYGDPVQCKAWVGQCALYIVIMMFEKTAIVLVLLIPHLKEVAKVKPIKNPQLELATVMLIVPFLLMH

SEQ ID NO: 68576 - DNA, 744 bp, Xenopus laevis
  CDS (1)..(744)
atgactgatataataagatctgctccccagggctgcaataatggggcgctcatggatcactttggtgtccttatccaaggagtgttggcagtggtggcattcagcacattaatgttaaagcgttgtagggaaccaaaagaagaaagacgtccatggaaaatttggttttatgatacttccaaacaagctatcggtgctctgttcattcattttacaaacgtctttctctcagacttgactgaaaaggacccctgctcattataccttatgaattttctacttgatgctacacttggcatgttggtcatctggatttgtgtgaaaattgtgtctgtgatcgtagaaaggcgacagtccacactcctagtgtttggggaatatggggatcctccacaagctgcggcctggctggggcaatgtgtactctatctagtaataatggtcgtggagaaaaccgtaataactcttgttctgctcttcccaggatggacaaagcttcaggcgattttattgaactacattccaaacccacagctggagcttgtccttgtaatgctggtggtaccatttatagtcaatgctataatgttctgggtggttgacagtttaataatgaggaagtacaagaaaatgaaaagggacaaaagtttagaaaccacttcaagctcaaacagtcctacgtatgatgatgaatcacaggtattgcttggttctgcatctgaccattaccgctcttatgagtaa

SEQ ID NO: 68577 - protein, 247 aa, Xenopus laevis
MTDIIRSAPQGCNNGALMDHFGVLIQGVLAVVAFSTLMLKRCREPKEERRPWKIWFYDTSKQAIGALFIHFTNVFLSDLTEKDPCSLYLMNFLLDATLGMLVIWICVKIVSVIVERRQSTLLVFGEYGDPPQAAAWLGQCVLYLVIMVVEKTVITLVLLFPGWTKLQAILLNYIPNPQLELVLVMLVVPFIVNAIMFWVVDSLIMRKYKKMKRDKSLETTSSSNSPTYDDESQVLLGSASDHYRSYE

SEQ ID NO: 68578 - DNA, 867 bp, Mus musculus
  CDS (1)..(867)
atgcaaggcccgggagggaacgtgagccgcggattgccgagcgggccggcctccacggtcgcgtccggggcgggccgctgtgagagcggcgcgctcatgcacagtttcggcatcttcctgcaggggctgctcggcgtcgtggccttcagcacattgatgcttaaacgcttcagagaaccaaagcatgaaagacggccgtggaggatatggtttttagacacttccaaacaagccatagggatgctcttcatccactttgcaaatgtgtacctagcagatctcactgaagaggacccttgttcactgtacctcatcaactttcttctggacgccactgtaggcatgctgctcatttatgtgggcgtacgcgccgtcggtgtcttggtggagtggcagcagtgggaatccctgcgttttggagaatatggagaccctctgcagtgcggggcctgggtaggacagtgcgccctctacatcgtgatcatgatctttgaaaagtccgtggtcttcatcgtcctcctcatactccagtggaaaaaggtggccctattgaatccaattgaaaaccccgacctgaagctggccatcgtcatgctgatagtccccttctttgtcaatgctttcatgttctgggtagtggacaatttcctcatgagaaaggggaagacgaaagctaaactagaagaaagaggagccaaccaggactcaaggaatgggagcaaggttcgctaccgaagggcagcatcccatgaggagtctgagtctgagatcctgatctcagctgactacgagatggaggagtctgacgccgaggaggacctccggagacctgtgaaaaagaagcaccgcttcgggctgcctgtatga

SEQ ID NO: 68579 - protein, 288 aa, Mus musculus
MQGPGGNVSRGLPSGPASTVASGAGRCESGALMHSFGIFLQGLLGVVAFSTLMLKRFREPKHERRPWRIWFLDTSKQAIGMLFIHFANVYLADLTEEDPCSLYLINFLLDATVGMLLIYVGVRAVGVLVEWQQWESLRFGEYGDPLQCGAWVGQCALYIVIMIFEKSVVFIVLLILQWKKVALLNPIENPDLKLAIVMLIVPFFVNAFMFWVVDNFLMRKGKTKAKLEERGANQDSRNGSKVRYRRAASHEESESEILISADYEMEESDAEEDLRRPVKKKHRFGLPV

SEQ ID NO: 68580 - DNA, 867 bp, Mus musculus
  CDS (1)..(867)
atgcaaggcccgggagggaacttgagccgcggattgccgagcgggccggcctccacggtcgcgtccgaggcgggccgctgtgagagcggcgcgctcatgcacagtttcggcatcttcctgcaggggctgctcggcgtcgtggccttcagcacattgatgcttaaacgcttcagagaaccaaagcatgaaagacggccgtggaggatatggtttttagacacttccaaacaagccatagggatgctcttcatccactttgcaaatgtgtacctagcagatctcactgaagaggacccttgttcactgtacctcatcaactttcttctggacgccactgtaggcatgctgctcatttatgtgggcgtacgcgccgtcggtgtcttggtggagtggcagcagtgggaatccctgcgttttggagaatatggagaccctctgcagtgcggggcctgggtaggacagtgcgccctctacatcgtgatcatgatctttgaaaagtccgtggtcttcatcgtcctcctcatactccagtggaaaaaggtggccctattgaatccaattgaaaaccccgacctgaagctggccatcgtcatgctgatagtccccttctttgtcaatgctttcatgttctgggtagtggacaatttcctcatgagaaaggggaagacgaaagctaaactagaagaaagaggagccaaccaggactcaaggaatgggagcaaggttcgctaccgaagggcagcatcccatgaggagtctgagtctgagatcctgatctcagctgacgacgagatggaggagtctgacgccgaggaggacctccggagacctgtgaaaaagaagcaccgcttcgggctgcctgtatga

SEQ ID NO: 68581 - protein, 288 aa, Mus musculus
MQGPGGNLSRGLPSGPASTVASEAGRCESGALMHSFGIFLQGLLGVVAFSTLMLKRFREPKHERRPWRIWFLDTSKQAIGMLFIHFANVYLADLTEEDPCSLYLINFLLDATVGMLLIYVGVRAVGVLVEWQQWESLRFGEYGDPLQCGAWVGQCALYIVIMIFEKSVVFIVLLILQWKKVALLNPIENPDLKLAIVMLIVPFFVNAFMFWVVDNFLMRKGKTKAKLEERGANQDSRNGSKVRYRRAASHEESESEILISADDEMEESDAEEDLRRPVKKKHRFGLPV

SEQ ID NO: 68582 - DNA, 26 bp, Artificial sequence
  Primer sequence
atgtatgtttctaatgggaaagacac

SEQ ID NO: 68583 - DNA, 25 bp, Artificial sequence
  Primer sequence
ctatattatgctaccatagctggaa

SEQ ID NO: 68584 - protein, 296 aa, Artificial sequence
  Consensus
  Variant (2)..(4): Xaa in position 2 to 4 is any amino acid
  Variant (6)..(9): Xaa in position 6 to 9 is any amino acid
  Variant (11)..(20): Xaa in position 11 to 20 is any amino acid
  Variant (22)..(23): Xaa in position 22 to 23 is any amino acid
  Variant (24)..(52): Xaa in position 24 to 52 is any or no amino acid
  Variant (55)..(56): Xaa in position 55 to 56 is any amino acid
  Variant (58)..(62): Xaa in position 58 to 62 is any amino acid
  Variant (63)..(64): Xaa in position 63 to 64 is any or no amino acid
  Variant (66)..(67): Xaa in position 66 to 67 is any amino acid
  Variant (69)..(70): Xaa in position 69 to 70 is any amino acid
  Variant (72)..(72): Xaa in position 72 is any amino acid
  Variant (76)..(77): Xaa in position 76 to 77 is any amino acid
  Variant (79)..(82): Xaa in position 79 to 82 is any amino acid
  Variant (84)..(85): Xaa in position 84 to 85 is any amino acid
  Variant (87)..(96): Xaa in position 87 to 96 is any amino acid
  Variant (97)..(134): Xaa in position 97 to 134 is any or no amino acid
  Variant (137)..(138): Xaa in position 137 to 138 is any amino acid
  Variant (140)..(141): Xaa in position 140 to 141 is any amino acid
  Variant (143)..(145): Xaa in position 143 to 145 is any amino acid
  Variant (147)..(147): Xaa in position 147 is any amino acid
  Variant (148)..(153): Xaa in position 148 to 153 is any or no amino acid
  Variant (155)..(155): Xaa in position 155 is any amino acid
  Variant (157)..(181): Xaa in position 157 to 181 is any amino acid
  Variant (182)..(185): Xaa in position 182 to 185 is any or no amino acid
  Variant (187)..(187): Xaa in position 187 is any amino acid
  Variant (190)..(198): Xaa in position 190 to 198 is any amino acid
  Variant (199)..(228): Xaa in position 199 to 228 is any or no amino acid
  Variant (230)..(232): Xaa in position 230 to 232 is any amino acid
  Variant (234)..(240): Xaa in position 234 to 240 is any amino acid
  Variant (242)..(271): Xaa in position 242 to 271 is any amino acid
  Variant (272)..(278): Xaa in position 272 to 278 is any or no amino acid
  Variant (281)..(283): Xaa in position 281 to 283 is any amino acid
  Variant (285)..(287): Xaa in position 285 to 287 is any amino acid
  Variant (289)..(295): Xaa in position 289 to 295 is any amino acid
LXXXFXXXXQXXXXXXXXXXLXXXXXXXXXXXXXXXXXXXXXXXXXXXXXXXKRXXEXXXXXXXWXXWXXDXSKQXXGXXXXHXXNXXXXXXXXXXXXXXXXXXXXXXXXXXXXXXXXXXXXXXXXXXXXXXXXPCXXYXXNXXXDXXXXXXXTXGXXXXXXXXXXXXXXXXXXXXXXXXXXXXXGXYGXXXXXXXXXXXXXXXXXXXXXXXXXXXXXXXXXXXXXXXQXXXYXXXXXXXKXXXXXXXXXXXXXXXXXXXXXXXXXXXXXXXXXXXXXVMXXXPXXXNXXXXXXXD

SEQ ID NO: 68585 - protein, 25 aa, Artificial sequence
  Consensus
  Variant (2)..(2): Xaa in position 2 is Pro, Ser or Thr
  Variant (3)..(4): Xaa in position 3 to 4 is any amino acid
  Variant (5)..(5): Xaa in position 5 is Ile or Val
  Variant (7)..(7): Xaa in position 7 is any or no amino acid
  Variant (9)..(9): Xaa in position 9 is any or no amino acid
  Variant (11)..(11): Xaa in position 11 is Ala, Thr or Val
  Variant (15)..(15): Xaa in position 15 is Ala, Leu or Val
  Variant (16)..(16): Xaa in position 16 is any amino acid
  Variant (18)..(20): Xaa in position 18 to 20 is any amino acid
  Variant (21)..(21): Xaa in position 21 is Ile, Leu, Met or Val
  Variant (23)..(24): Xaa in position 23 to 24 is any amino acid
RXXXXWXFXDXSKQXXGXXXXHXXN

SEQ ID NO: 68586 - protein, 43 aa, Artificial sequence
  Consensus
  Variant (2)..(2): Xaa in position 2 is Asp or Ser
  Variant (3)..(3): Xaa in position 3 is any amino acid
  Variant (5)..(5): Xaa in position 5 is any or no amino acid
  Variant (7)..(7): Xaa in position 7 is any or no amino acid
  Variant (9)..(9): Xaa in position 9 is Phe, Ile or Leu
  Variant (10)..(10): Xaa in position 10 is Ala, Gly, Ile, Leu or Val
  Variant (11)..(11): Xaa in position 11 is Ile, Leu or Val
  Variant (13)..(13): Xaa in position 13 is Ala, Cys or Thr
  Variant (15)..(15): Xaa in position 15 is Ile, Leu or Val
  Variant (17)..(18): Xaa in position 17 to 18 is any amino acid
  Variant (19)..(19): Xaa in position 19 is any or no amino acid
  Variant (21)..(30): Xaa in position 21 to 30 is any amino acid
  Variant (31)..(31): Xaa in position 31 is Ile, Leu or Val
  Variant (32)..(42): Xaa in position 32 to 42 is any amino acid
  Variant (43)..(43): Xaa in position 43 is Glu, Gly or Ser
CXXYXLXNXXXDXTXGXXXIXXXXXXXXXXXXXXXXXXXXXXX

SEQ ID NO: 68587 - DNA, 1047 bp, Escherichia coli K12; identical to SEQ ID NO: 1323
  CDS (1)..(1047)

SEQ ID NO: 68588 - protein, 348 aa, Escherichia coli K12; identical to SEQ ID NO: 1324

SEQ ID NO: 68589 - DNA, 1235 bp, Salmonella typhimurium; identical to SEQ ID NO: 1325
  CDS (165)..(1235)

SEQ ID NO: 68590 - protein, 356 aa, Salmonella typhimurium; identical to SEQ ID NO: 1326

SEQ ID NO: 68591 - DNA, 1086 bp, Deinococcus radiodurans; identical to SEQ ID NO: 1327
  CDS (1)..(1086)

SEQ ID NO: 68592 - protein, 361 aa, Deinococcus radiodurans; identical to SEQ ID NO: 1328

SEQ ID NO: 68593 - DNA, 1056 bp, Neisseria meningitidis; identical to SEQ ID NO: 1329
  CDS (1)..(1056)

SEQ ID NO: 68594 - protein, 351 aa, Neisseria meningitidis; identical to SEQ ID NO: 1330

SEQ ID NO: 68595 - DNA, 1047 bp, Yersinia pestis; identical to SEQ ID NO: 1331
  CDS (1)..(1047)

SEQ ID NO: 68596 - protein, 348 aa, Yersinia pestis; identical to SEQ ID NO: 1332

SEQ ID NO: 68597 - DNA, 1071 bp, Escherichia coli; identical to SEQ ID NO: 1333
  CDS (1)..(1071)

SEQ ID NO: 68598 - protein, 356 aa, Escherichia coli; identical to SEQ ID NO: 1334

SEQ ID NO: 68599 - DNA, 1131 bp, Nostoc sp. PCC 7120; identical to SEQ ID NO: 1335
  CDS (1)..(1131)

SEQ ID NO: 68600 - protein, 376 aa, Nostoc sp. PCC 7120; identical to SEQ ID NO: 1336

SEQ ID NO: 68601 - DNA, 1053 bp, Salmonella enterica subsp. enterica serovar Typhi; identical to SEQ ID NO: 1337
  CDS (1)..(1053)

SEQ ID NO: 68602 - protein, 350 aa, Salmonella enterica subsp. enterica serovar Typhi; identical to SEQ ID NO: 1338

SEQ ID NO: 68603 - DNA, 1077 bp, Pseudomonas aeruginosa; identical to SEQ ID NO: 1339
  CDS (1)..(1077)

SEQ ID NO: 68604 - protein, 358 aa, Pseudomonas aeruginosa; identical to SEQ ID NO: 1340

SEQ ID NO: 68605 - DNA, 1047 bp, Buchnera sp; identical to SEQ ID NO: 1341
  CDS (1)..(1047)

SEQ ID NO: 68606 - protein, 348 aa, Buchnera sp; identical to SEQ ID NO: 1342

SEQ ID NO: 68607 - DNA, 1074 bp, Vibrio cholerae; identical to SEQ ID NO: 1343
  CDS (1)..(1074)

SEQ ID NO: 68608 - protein, 357 aa, Vibrio cholerae; identical to SEQ ID NO: 1344

SEQ ID NO: 68609 - DNA, 1038 bp, Lactococcus lactis subsp. lactis; identical to SEQ ID NO: 1345
  CDS (1)..(1038)

SEQ ID NO: 68610 - protein, 345 aa, Lactococcus lactis subsp. lactis; identical to SEQ ID NO: 1346

SEQ ID NO: 68611 - DNA, 1023 bp, Lactococcus lactis subsp. lactis; identical to SEQ ID NO: 1347
  CDS (1)..(1023)

SEQ ID NO: 68612 - protein, 340 aa, Lactococcus lactis subsp. lactis; identical to SEQ ID NO: 1348

SEQ ID NO: 68613 - DNA, 1032 bp, Streptococcus pneumoniae; identical to SEQ ID NO: 1349
  CDS (1)..(1032)

SEQ ID NO: 68614 - protein, 343 aa, Streptococcus pneumoniae; identical to SEQ ID NO: 1350

SEQ ID NO: 68615 - DNA, 1095 bp, Pseudomonas aeruginosa; identical to SEQ ID NO: 1351
  CDS (1)..(1095)

SEQ ID NO: 68616 - protein, 364 aa, Pseudomonas aeruginosa; identical to SEQ ID NO: 1352

SEQ ID NO: 68617 - DNA, 1110 bp, Caulobacter crescentus; identical to SEQ ID NO: 1353
  CDS (1)..(1110)

SEQ ID NO: 68618 - protein, 369 aa, Caulobacter crescentus; identical to SEQ ID NO: 1354

SEQ ID NO: 68619 - DNA, 1032 bp, Streptococcus pneumoniae; identical to SEQ ID NO: 1355
  CDS (1)..(1032)

SEQ ID NO: 68620 - protein, 343 aa, Streptococcus pneumoniae; identical to SEQ ID NO: 1356

SEQ ID NO: 68621 - DNA, 1047 bp, Buchnera aphidicola; identical to SEQ ID NO: 1357
  CDS (1)..(1047)

SEQ ID NO: 68622 - protein, 348 aa, Buchnera aphidicola; identical to SEQ ID NO: 1358

SEQ ID NO: 68623 - DNA, 1089 bp, Haemophilus influenzae; identical to SEQ ID NO: 1359
  CDS (1)..(1089)

SEQ ID NO: 68624 - protein, 362 aa, Haemophilus influenzae; identical to SEQ ID NO: 1360

SEQ ID NO: 68625 - DNA, 1502 bp, Candida albicans; identical to SEQ ID NO: 1361
  CDS (336)..(1442)

SEQ ID NO: 68626 - protein, 368 aa, Candida albicans; identical to SEQ ID NO: 1362

SEQ ID NO: 68627 - DNA, 1113 bp, Saccharomyces cerevisiae; identical to SEQ ID NO: 1363
  CDS (1)..(1113)

SEQ ID NO: 68628 - protein, 370 aa, Saccharomyces cerevisiae; identical to SEQ ID NO: 1364

SEQ ID NO: 68629 - DNA, 2048 bp, Saccharomyces cerevisiae; identical to SEQ ID NO: 1365
  CDS (619)..(1731)

SEQ ID NO: 68630 - protein, 370 aa, Saccharomyces cerevisiae; identical to SEQ ID NO: 1366

SEQ ID NO: 68631 - DNA, 1107 bp, Schizosaccharomyces pombe; identical to SEQ ID NO: 1367
  CDS (1)..(1107)

SEQ ID NO: 68632 - protein, 368 aa, Schizosaccharomyces pombe; identical to SEQ ID NO: 1368

SEQ ID NO: 68633 - DNA, 1089 bp, Amycolatopsis orientalis; identical to SEQ ID NO: 1369
  CDS (1)..(1089)

SEQ ID NO: 68634 - protein, 362 aa, Amycolatopsis orientalis; identical to SEQ ID NO: 1370

SEQ ID NO: 68635 - DNA, 1119 bp, Schizosaccharomyces pombe; identical to SEQ ID NO: 1371
  CDS (1)..(1119)

SEQ ID NO: 68636 - protein, 372 aa, Schizosaccharomyces pombe; identical to SEQ ID NO: 1372

SEQ ID NO: 68637 - DNA, 1248 bp, Corynebacterium glutamicum; identical to SEQ ID NO: 1373
  CDS (101)..(1228)

SEQ ID NO: 68638 - protein, 375 aa, Corynebacterium glutamicum; identical to SEQ ID NO: 1374

SEQ ID NO: 68639 - DNA, 1083 bp, Methylophilus methylotrophus; identical to SEQ ID NO: 1375
  CDS (1)..(1083)

SEQ ID NO: 68640 - protein, 360 aa, Methylophilus methylotrophus; identical to SEQ ID NO: 1376

SEQ ID NO: 68641 - DNA, 1107 bp, Debaryomyces hansenii; identical to SEQ ID NO: 1377
  CDS (1)..(1107)

SEQ ID NO: 68642 - protein, 368 aa, Debaryomyces hansenii; identical to SEQ ID NO: 1378

SEQ ID NO: 68643 - DNA, 1074 bp, Yarrowia lipolytica; identical to SEQ ID NO: 1379
  CDS (1)..(1074)

SEQ ID NO: 68644 - protein, 357 aa, Yarrowia lipolytica; identical to SEQ ID NO: 1380

SEQ ID NO: 68645 - DNA, 1089 bp, Yarrowia lipolytica; identical to SEQ ID NO: 1381
  CDS (1)..(1089)

SEQ ID NO: 68646 - protein, 362 aa, Yarrowia lipolytica; identical to SEQ ID NO: 1382

SEQ ID NO: 68647 - DNA, 1119 bp, Kluyveromyces lactis; identical to SEQ ID NO: 1383
  CDS (1)..(1119)

SEQ ID NO: 68648 - protein, 372 aa, Kluyveromyces lactis; identical to SEQ ID NO: 1384

SEQ ID NO: 68649 - DNA, 1095 bp, Kluyveromyces lactis; identical to SEQ ID NO: 1385
  CDS (1)..(1095)

SEQ ID NO: 68650 - protein, 364 aa, Kluyveromyces lactis; identical to SEQ ID NO: 1386

SEQ ID NO: 68651 - DNA, 1074 bp, Erwinia carotovora subsp; identical to SEQ ID NO: 1387
  CDS (1)..(1074)

SEQ ID NO: 68652 - protein, 357 aa, Erwinia carotovora subsp; identical to SEQ ID NO: 1388

SEQ ID NO: 68653 - DNA, 1047 bp, Erwinia carotovora subsp; identical to SEQ ID NO: 1389
  CDS (1)..(1047)

SEQ ID NO: 68654 - protein, 348 aa, Erwinia carotovora subsp; identical to SEQ ID NO: 1390

SEQ ID NO: 68655 - DNA, 1056 bp, Erwinia carotovora subsp; identical to SEQ ID NO: 1391
  CDS (1)..(1056)

SEQ ID NO: 68656 - protein, 351 aa, Erwinia carotovora subsp; identical to SEQ ID NO: 1392

SEQ ID NO: 68657 - DNA, 1113 bp, Acinetobacter sp; identical to SEQ ID NO: 1393
  CDS (1)..(1113)

SEQ ID NO: 68658 - protein, 370 aa, Acinetobacter sp; identical to SEQ ID NO: 1394

SEQ ID NO: 68659 - DNA, 1056 bp, Acinetobacter sp; identical to SEQ ID NO: 1395
  CDS (1)..(1056)

SEQ ID NO: 68660 - protein, 351 aa, Acinetobacter sp; identical to SEQ ID NO: 1396

SEQ ID NO: 68661 - DNA, 1119 bp, Candida glabrata; identical to SEQ ID NO: 1397
  CDS (1)..(1119)

SEQ ID NO: 68662 - protein, 372 aa, Candida glabrata; identical to SEQ ID NO: 1398

SEQ ID NO: 68663 - DNA, 1071 bp, Candida glabrata; identical to SEQ ID NO: 1399
  CDS (1)..(1071)

SEQ ID NO: 68664 - protein, 356 aa, Candida glabrata; identical to SEQ ID NO: 1400

SEQ ID NO: 68665 - DNA, 1083 bp, Photobacterium profundum; identical to SEQ ID NO: 1401
  CDS (1)..(1083)

SEQ ID NO: 68666 - protein, 360 aa, Photobacterium profundum; identical to SEQ ID NO: 1402

SEQ ID NO: 68667 - DNA, 1053 bp, Photobacterium profundum; identical to SEQ ID NO: 1403
  CDS (1)..(1053)

SEQ ID NO: 68668 - protein, 350 aa, Photobacterium profundum; identical to SEQ ID NO: 1404

SEQ ID NO: 68669 - DNA, 1113 bp, Photobacterium profundum; identical to SEQ ID NO: 1405
  CDS (1)..(1113)

SEQ ID NO: 68670 - protein, 370 aa, Photobacterium profundum; identical to SEQ ID NO: 1406

SEQ ID NO: 68671 - DNA, 1056 bp, Photobacterium profundum; identical to SEQ ID NO: 1407
  CDS (1)..(1056)

SEQ ID NO: 68672 - protein, 351 aa, Photobacterium profundum; identical to SEQ ID NO: 1408

SEQ ID NO: 68673 - DNA, 1092 bp, Parachlamydia sp; identical to SEQ ID NO: 1409
  CDS (1)..(1092)

SEQ ID NO: 68674 - protein, 363 aa, Parachlamydia sp; identical to SEQ ID NO: 1410

SEQ ID NO: 68675 - DNA, 1095 bp, Rhodopseudomonas palustris; identical to SEQ ID NO: 1411
  CDS (1)..(1095)

SEQ ID NO: 68676 - protein, 364 aa, Rhodopseudomonas palustris; identical to SEQ ID NO: 1412

SEQ ID NO: 68677 - DNA, 1100 bp, Amycolatopsis methanolica; identical to SEQ ID NO: 1413
  CDS (1)..(1086)

SEQ ID NO: 68678 - protein, 361 aa, Amycolatopsis methanolica; identical to SEQ ID NO: 1414

SEQ ID NO: 68679 - DNA, 1071 bp, Treponema denticola; identical to SEQ ID NO: 1415
  CDS (1)..(1071)

SEQ ID NO: 68680 - protein, 356 aa, Treponema denticola; identical to SEQ ID NO: 1416

SEQ ID NO: 68681 - DNA, 1068 bp, Geobacter sulfurreducens; identical to SEQ ID NO: 1417
  CDS (1)..(1068)

SEQ ID NO: 68682 - protein, 355 aa, Geobacter sulfurreducens; identical to SEQ ID NO: 1418

SEQ ID NO: 68683 - DNA, 1095 bp, Ashbya gossypii; identical to SEQ ID NO: 1419
  CDS (1)..(1095)

SEQ ID NO: 68684 - protein, 364 aa, Ashbya gossypii; identical to SEQ ID NO: 1420

SEQ ID NO: 68685 - DNA, 1122 bp, Ashbya gossypii; identical to SEQ ID NO: 1421
  CDS (1)..(1122)

SEQ ID NO: 68686 - protein, 373 aa, Ashbya gossypii; identical to SEQ ID NO: 1422

SEQ ID NO: 68687 - DNA, 1098 bp, Amycolatopsis balhimycina; identical to SEQ ID NO: 1423
  CDS (1)..(1098)

SEQ ID NO: 68688 - protein, 365 aa, Amycolatopsis balhimycina; identical to SEQ ID NO: 1424

SEQ ID NO: 68689 - DNA, 1071 bp, Vibrio vulnificus; identical to SEQ ID NO: 1425
  CDS (1)..(1071)

SEQ ID NO: 68690 - protein, 356 aa, Vibrio vulnificus; identical to SEQ ID NO: 1426

SEQ ID NO: 68691 - DNA, 1047 bp, Photorhabdus luminescens; identical to SEQ ID NO: 1427
  CDS (1)..(1047)

SEQ ID NO: 68692 - protein, 348 aa, Photorhabdus luminescens; identical to SEQ ID NO: 1428

SEQ ID NO: 68693 - DNA, 1053 bp, Photorhabdus luminescens; identical to SEQ ID NO: 1429
  CDS (1)..(1053)

SEQ ID NO: 68694 - protein, 350 aa, Photorhabdus luminescens; identical to SEQ ID NO: 1430

SEQ ID NO: 68695 - DNA, 1095 bp, Photorhabdus luminescens; identical to SEQ ID NO: 1431
  CDS (1)..(1095)

SEQ ID NO: 68696 - protein, 364 aa, Photorhabdus luminescens; identical to SEQ ID NO: 1432

SEQ ID NO: 68697 - DNA, 1119 bp, Gloeobacter violaceus; identical to SEQ ID NO: 1433
  CDS (1)..(1119)

SEQ ID NO: 68698 - protein, 372 aa, Gloeobacter violaceus; identical to SEQ ID NO: 1434

SEQ ID NO: 68699 - DNA, 1107 bp, Chromobacterium violaceum; identical to SEQ ID NO: 1435
  CDS (1)..(1107)

SEQ ID NO: 68700 - protein, 368 aa, Chromobacterium violaceum; identical to SEQ ID NO: 1436

SEQ ID NO: 68701 - DNA, 1059 bp, Chromobacterium violaceum; identical to SEQ ID NO: 1437
  CDS (1)..(1059)

SEQ ID NO: 68702 - protein, 352 aa, Chromobacterium violaceum; identical to SEQ ID NO: 1438

SEQ ID NO: 68703 - DNA, 1140 bp, Neurospora crassa; identical to SEQ ID NO: 1439
  CDS (1)..(1140)

SEQ ID NO: 68704 - protein, 379 aa, Neurospora crassa; identical to SEQ ID NO: 1440

SEQ ID NO: 68705 - DNA, 1092 bp, Neurospora crassa; identical to SEQ ID NO: 1441
  CDS (1)..(1092)

SEQ ID NO: 68706 - protein, 363 aa, Neurospora crassa; identical to SEQ ID NO: 1442

SEQ ID NO: 68707 - DNA, 1068 bp, Synechococcus sp; identical to SEQ ID NO: 1443
  CDS (1)..(1068)

SEQ ID NO: 68708 - protein, 355 aa, Synechococcus sp; identical to SEQ ID NO: 1444

SEQ ID NO: 68709 - DNA, 1053 bp, Rhodopirellula baltica; identical to SEQ ID NO: 1445
  CDS (1)..(1053)

SEQ ID NO: 68710 - protein, 350 aa, Rhodopirellula baltica; identical to SEQ ID NO: 1446

SEQ ID NO: 68711 - DNA, 1068 bp, Prochlorococcus marinus subsp; identical to SEQ ID NO: 1447
  CDS (1)..(1068)

SEQ ID NO: 68712 - protein, 355 aa, Prochlorococcus marinus subsp; identical to SEQ ID NO: 1448

SEQ ID NO: 68713 - DNA, 1083 bp, Prochlorococcus marinus; identical to SEQ ID NO: 1449
  CDS (1)..(1083)

SEQ ID NO: 68714 - protein, 360 aa, Prochlorococcus marinus; identical to SEQ ID NO: 1450

SEQ ID NO: 68715 - DNA, 1074 bp, Prochlorococcus marinus; identical to SEQ ID NO: 1451
  CDS (1)..(1074)

SEQ ID NO: 68716 - protein, 357 aa, Prochlorococcus marinus; identical to SEQ ID NO: 1452

SEQ ID NO: 68717 - DNA, 1113 bp, Haemophilus ducreyi; identical to SEQ ID NO: 1453
  CDS (1)..(1113)

SEQ ID NO: 68718 - protein, 370 aa, Haemophilus ducreyi; identical to SEQ ID NO: 1454

SEQ ID NO: 68719 - DNA, 1080 bp, Haemophilus ducreyi; identical to SEQ ID NO: 1455
  CDS (1)..(1080)

SEQ ID NO: 68720 - protein, 359 aa, Haemophilus ducreyi; identical to SEQ ID NO: 1456

SEQ ID NO: 68721 - DNA, 1086 bp, Candidatus Blochmannia floridanus; identical to SEQ ID NO: 1457
  CDS (1)..(1086)

SEQ ID NO: 68722 - protein, 361 aa, Candidatus Blochmannia floridanus; identical to SEQ ID NO: 1458

SEQ ID NO: 68723 - DNA, 1074 bp, Bordetella pertussis; identical to SEQ ID NO: 1459
  CDS (1)..(1074)

SEQ ID NO: 68724 - protein, 357 aa, Bordetella pertussis; identical to SEQ ID NO: 1460

SEQ ID NO: 68725 - DNA, 1119 bp, Bordetella bronchiseptica; identical to SEQ ID NO: 1461
  CDS (1)..(1119)

SEQ ID NO: 68726 - protein, 372 aa, Bordetella bronchiseptica; identical to SEQ ID NO: 1462

SEQ ID NO: 68727 - DNA, 1179 bp, Nitrosomonas europaea; identical to SEQ ID NO: 1463
  CDS (1)..(1179)

SEQ ID NO: 68728 - protein, 392 aa, Nitrosomonas europaea; identical to SEQ ID NO: 1464

SEQ ID NO: 68729 - DNA, 1083 bp, Coxiella burnetii; identical to SEQ ID NO: 1465
  CDS (1)..(1083)

SEQ ID NO: 68730 - protein, 360 aa, Coxiella burnetii; identical to SEQ ID NO: 1466

SEQ ID NO: 68731 - DNA, 834 bp, Vibrio anguillarum; identical to SEQ ID NO: 1467
  CDS (1)..(834)

SEQ ID NO: 68732 - protein, 277 aa, Vibrio anguillarum; identical to SEQ ID NO: 1468

SEQ ID NO: 68733 - DNA, 1143 bp, Xylella fastidiosa; identical to SEQ ID NO: 1469
  CDS (1)..(1143)

SEQ ID NO: 68734 - protein, 380 aa, Xylella fastidiosa; identical to SEQ ID NO: 1470

SEQ ID NO: 68735 - DNA, 1053 bp, Vibrio parahaemolyticus; identical to SEQ ID NO: 1471
  CDS (1)..(1053)

SEQ ID NO: 68736 - protein, 350 aa, Vibrio parahaemolyticus; identical to SEQ ID NO: 1472

SEQ ID NO: 68737 - DNA, 1053 bp, Vibrio parahaemolyticus; identical to SEQ ID NO: 1473
  CDS (1)..(1053)

SEQ ID NO: 68738 - protein, 350 aa, Vibrio parahaemolyticus; identical to SEQ ID NO: 1474

SEQ ID NO: 68739 - DNA, 1074 bp, Vibrio parahaemolyticus; identical to SEQ ID NO: 1475
  CDS (1)..(1074)

SEQ ID NO: 68740 - protein, 357 aa, Vibrio parahaemolyticus; identical to SEQ ID NO: 1476

SEQ ID NO: 68741 - DNA, 1083 bp, Pseudomonas syringae; identical to SEQ ID NO: 1477
  CDS (1)..(1083)

SEQ ID NO: 68742 - protein, 360 aa, Pseudomonas syringae; identical to SEQ ID NO: 1478

SEQ ID NO: 68743 - DNA, 1077 bp, Pseudomonas syringae; identical to SEQ ID NO: 1479
  CDS (1)..(1077)

SEQ ID NO: 68744 - protein, 358 aa, Pseudomonas syringae; identical to SEQ ID NO: 1480

SEQ ID NO: 68745 - DNA, 1062 bp, Pseudomonas putida; identical to SEQ ID NO: 1481
  CDS (1)..(1062)

SEQ ID NO: 68746 - protein, 353 aa, Pseudomonas putida; identical to SEQ ID NO: 1482

SEQ ID NO: 68747 - DNA, 1113 bp, Pseudomonas putida; identical to SEQ ID NO: 1483
  CDS (1)..(1113)

SEQ ID NO: 68748 - protein, 370 aa, Pseudomonas putida; identical to SEQ ID NO: 1484

SEQ ID NO: 68749 - DNA, 1086 bp, Bradyrhizobium japonicum; identical to SEQ ID NO: 1485
  CDS (1)..(1086)

SEQ ID NO: 68750 - protein, 361 aa, Bradyrhizobium japonicum; identical to SEQ ID NO: 1486

SEQ ID NO: 68751 - DNA, 1053 bp, Yersinia pestis; identical to SEQ ID NO: 1487
  CDS (1)..(1053)

SEQ ID NO: 68752 - protein, 350 aa, Yersinia pestis; identical to SEQ ID NO: 1488

SEQ ID NO: 68753 - DNA, 1077 bp, Yersinia pestis; identical to SEQ ID NO: 1489
  CDS (1)..(1077)

SEQ ID NO: 68754 - protein, 358 aa, Yersinia pestis; identical to SEQ ID NO: 1490

SEQ ID NO: 68755 - DNA, 1038 bp, Wigglesworthia glossinidia brevipalpis; identical to SEQ ID NO: 1491
  CDS (1)..(1038)

SEQ ID NO: 68756 - protein, 345 aa, Wigglesworthia glossinidia brevipalpis; identical to SEQ ID NO: 1492

SEQ ID NO: 68757 - DNA, 1053 bp, Vibrio vulnificus; identical to SEQ ID NO: 1493
  CDS (1)..(1053)

SEQ ID NO: 68758 - protein, 350 aa, Vibrio vulnificus; identical to SEQ ID NO: 1494

SEQ ID NO: 68759 - DNA, 1053 bp, Vibrio vulnificus; identical to SEQ ID NO: 1495
  CDS (1)..(1053)

SEQ ID NO: 68760 - protein, 350 aa, Vibrio vulnificus; identical to SEQ ID NO: 1496

SEQ ID NO: 68761 - DNA, 1071 bp, Vibrio vulnificus; identical to SEQ ID NO: 1497
  CDS (1)..(1071)

SEQ ID NO: 68762 - protein, 356 aa, Vibrio vulnificus; identical to SEQ ID NO: 1498

SEQ ID NO: 68763 - DNA, 1062 bp, Synechococcus elongatus; identical to SEQ ID NO: 1499
  CDS (1)..(1062)

SEQ ID NO: 68764 - protein, 353 aa, Synechococcus elongatus; identical to SEQ ID NO: 1500

SEQ ID NO: 68765 - DNA, 1032 bp, Streptococcus mutans; identical to SEQ ID NO: 1501
  CDS (1)..(1032)

SEQ ID NO: 68766 - protein, 343 aa, Streptococcus mutans; identical to SEQ ID NO: 1502

SEQ ID NO: 68767 - DNA, 1035 bp, Streptococcus mutans; identical to SEQ ID NO: 1503
  CDS (1)..(1035)

SEQ ID NO: 68768 - protein, 344 aa, Streptococcus mutans; identical to SEQ ID NO: 1504

SEQ ID NO: 68769 - DNA, 1008 bp, Streptococcus agalactiae; identical to SEQ ID NO: 1505
  CDS (1)..(1008)

SEQ ID NO: 68770 - protein, 335 aa, Streptococcus agalactiae; identical to SEQ ID NO: 1506

SEQ ID NO: 68771 - DNA, 1065 bp, Shewanella oneidensis; identical to SEQ ID NO: 1507
  CDS (1)..(1065)

SEQ ID NO: 68772 - protein, 354 aa, Shewanella oneidensis; identical to SEQ ID NO: 1508

SEQ ID NO: 68773 - DNA, 1092 bp, Shewanella oneidensis; identical to SEQ ID NO: 1509
  CDS (1)..(1092)

SEQ ID NO: 68774 - protein, 363 aa, Shewanella oneidensis; identical to SEQ ID NO: 1510

SEQ ID NO: 68775 - DNA, 1059 bp, Shewanella oneidensis; identical to SEQ ID NO: 1511
  CDS (1)..(1059)

SEQ ID NO: 68776 - protein, 352 aa, Shewanella oneidensis; identical to SEQ ID NO: 1512

SEQ ID NO: 68777 - DNA, 1053 bp, Escherichia coli O6; identical to SEQ ID NO: 1513
  CDS (1)..(1053)

SEQ ID NO: 68778 - protein, 350 aa, Escherichia coli O6; identical to SEQ ID NO: 1514

SEQ ID NO: 68779 - DNA, 1170 bp, Corynebacterium efficiens; identical to SEQ ID NO: 1515
  CDS (1)..(1170)

SEQ ID NO: 68780 - protein, 389 aa, Corynebacterium efficiens; identical to SEQ ID NO: 1516

SEQ ID NO: 68781 - DNA, 1134 bp, Bifidobacterium longum; identical to SEQ ID NO: 1517
  CDS (1)..(1134)

SEQ ID NO: 68782 - protein, 377 aa, Bifidobacterium longum; identical to SEQ ID NO: 1518

SEQ ID NO: 68783 - DNA, 1233 bp, Bifidobacterium longum; identical to SEQ ID NO: 1519
  CDS (1)..(1233)

SEQ ID NO: 68784 - protein, 410 aa, Bifidobacterium longum; identical to SEQ ID NO: 1520

SEQ ID NO: 68785 - DNA, 1221 bp, Phytophthora infestans; identical to SEQ ID NO: 1521
  CDS (20)..(1153)

SEQ ID NO: 68786 - protein, 377 aa, Phytophthora infestans; identical to SEQ ID NO: 1522

SEQ ID NO: 68787 - DNA, 1062 bp, Chlorobium tepidum; identical to SEQ ID NO: 1523
  CDS (1)..(1062)

SEQ ID NO: 68788 - protein, 353 aa, Chlorobium tepidum; identical to SEQ ID NO: 1524

SEQ ID NO: 68789 - DNA, 1074 bp, Xanthomonas campestris; identical to SEQ ID NO: 1525
  CDS (1)..(1074)

SEQ ID NO: 68790 - protein, 357 aa, Xanthomonas campestris; identical to SEQ ID NO: 1526

SEQ ID NO: 68791 - DNA, 1074 bp, Xanthomonas axonopodis; identical to SEQ ID NO: 1527
  CDS (1)..(1074)

SEQ ID NO: 68792 - protein, 357 aa, Xanthomonas axonopodis; identical to SEQ ID NO: 1528

SEQ ID NO: 68793 - DNA, 1080 bp, Ralstonia solanacearum; identical to SEQ ID NO: 1529
  CDS (1)..(1080)

SEQ ID NO: 68794 - protein, 359 aa, Ralstonia solanacearum; identical to SEQ ID NO: 1530

SEQ ID NO: 68795 - DNA, 1179 bp, Ralstonia solanacearum; identical to SEQ ID NO: 1531
  CDS (1)..(1179)

SEQ ID NO: 68796 - protein, 392 aa, Ralstonia solanacearum; identical to SEQ ID NO: 1532

SEQ ID NO: 68797 - DNA, 1065 bp, Synechococcus sp; identical to SEQ ID NO: 1533
  CDS (1)..(1065)

SEQ ID NO: 68798 - protein, 354 aa, Synechococcus sp; identical to SEQ ID NO: 1534

SEQ ID NO: 68799 - DNA, 1035 bp, Escherichia coli; identical to SEQ ID NO: 1535
  CDS (1)..(1035)

SEQ ID NO: 68800 - protein, 344 aa, Escherichia coli; identical to SEQ ID NO: 1536

SEQ ID NO: 68801 - DNA, 1200 bp, Stigmatella aurantiaca; identical to SEQ ID NO: 1537
  CDS (62)..(1147)

SEQ ID NO: 68802 - protein, 361 aa, Stigmatella aurantiaca; identical to SEQ ID NO: 1538

SEQ ID NO: 68803 - DNA, 1092 bp, Rhizobium loti; identical to SEQ ID NO: 1539
  CDS (1)..(1092)

SEQ ID NO: 68804 - protein, 363 aa, Rhizobium loti; identical to SEQ ID NO: 1540

SEQ ID NO: 68805 - DNA, 1083 bp, Amycolatopsis mediterranei; identical to SEQ ID NO: 1541
  CDS (1)..(1083)

SEQ ID NO: 68806 - protein, 360 aa, Amycolatopsis mediterranei; identical to SEQ ID NO: 1542

SEQ ID NO: 68807 - DNA, 1053 bp, Pasteurella multocida; identical to SEQ ID NO: 1543
  CDS (1)..(1053)

SEQ ID NO: 68808 - protein, 350 aa, Pasteurella multocida; identical to SEQ ID NO: 1544

SEQ ID NO: 68809 - DNA, 1086 bp, Pasteurella multocida; identical to SEQ ID NO: 1545
  CDS (1)..(1086)

SEQ ID NO: 68810 - protein, 361 aa, Pasteurella multocida; identical to SEQ ID NO: 1546

SEQ ID NO: 68811 - DNA, 1125 bp, Emericella nidulans; identical to SEQ ID NO: 1547
  CDS (1)..(1125)

SEQ ID NO: 68812 - protein, 374 aa, Emericella nidulans; identical to SEQ ID NO: 1548

SEQ ID NO: 68813 - DNA, 1089 bp, Emericella nidulans; identical to SEQ ID NO: 1549
  CDS (1)..(1089)

SEQ ID NO: 68814 - protein, 362 aa, Emericella nidulans; identical to SEQ ID NO: 1550

SEQ ID NO: 68815 - DNA, 1239 bp, Vibrio cholerae; identical to SEQ ID NO: 1551
  CDS (114)..(1175)

SEQ ID NO: 68816 - protein, 353 aa, Vibrio cholerae; identical to SEQ ID NO: 1552

SEQ ID NO: 68817 - DNA, 2184 bp, Candida albicans; identical to SEQ ID NO: 1553
  CDS (461)..(1573)

SEQ ID NO: 68818 - protein, 370 aa, Candida albicans; identical to SEQ ID NO: 1554

SEQ ID NO: 68819 - DNA, 1047 bp, Buchnera aphidicola; identical to SEQ ID NO: 1555
  CDS (1)..(1047)

SEQ ID NO: 68820 - protein, 348 aa, Buchnera aphidicola; identical to SEQ ID NO: 1556

SEQ ID NO: 68821 - DNA, 1047 bp, Buchnera aphidicola; identical to SEQ ID NO: 1557
  CDS (1)..(1047)

SEQ ID NO: 68822 - protein, 348 aa, Buchnera aphidicola; identical to SEQ ID NO: 1558

SEQ ID NO: 68823 - DNA, 1047 bp, Erwinia herbicola; identical to SEQ ID NO: 1559
  CDS (1)..(1047)

SEQ ID NO: 68824 - protein, 348 aa, Erwinia herbicola; identical to SEQ ID NO: 1560

SEQ ID NO: 68825 - DNA, 1047 bp, Salmonella typhimurium; identical to SEQ ID NO: 1561
  CDS (1)..(1047)

SEQ ID NO: 68826 - protein, 348 aa, Salmonella typhimurium; identical to SEQ ID NO: 1562

SEQ ID NO: 68827 - DNA, 23 bp, Artificial sequence
  Primer sequence
atgaacagaactgacgaactccg

SEQ ID NO: 68828 - DNA, 24 bp, Artificial sequence
  Primer sequence
ttagaagcgggtatctaccgcaga

SEQ ID NO: 68829 - protein, 352 aa, Artificial sequence; identical to SEQ ID NO: 19007
  Consensus
  Variant (2)..(3): Xaa in position 2 to 3 is any amino acid
  Variant (5)..(11): Xaa in position 5 to 11 is any amino acid
  Variant (13)..(24): Xaa in position 13 to 24 is any amino acid
  Variant (26)..(30): Xaa in position 26 to 30 is any amino acid
  Variant (32)..(33): Xaa in position 32 to 33 is any amino acid
  Variant (35)..(35): Xaa in position 35 is any amino acid
  Variant (37)..(40): Xaa in position 37 to 40 is any amino acid
  Variant (42)..(43): Xaa in position 42 to 43 is any amino acid
  Variant (45)..(46): Xaa in position 45 to 46 is any amino acid
  Variant (51)..(51): Xaa in position 51 is any amino acid
  Variant (54)..(55): Xaa in position 54 to 55 is any amino acid
  Variant (58)..(59): Xaa in position 58 to 59 is any amino acid
  Variant (62)..(63): Xaa in position 62 to 63 is any amino acid
  Variant (65)..(76): Xaa in position 65 to 76 is any amino acid
  Variant (78)..(80): Xaa in position 78 to 80 is any amino acid
  Variant (83)..(83): Xaa in position 83 is any amino acid
  Variant (85)..(85): Xaa in position 85 is any amino acid
  Variant (91)..(93): Xaa in position 91 to 93 is any amino acid
  Variant (100)..(100): Xaa in position 100 is any amino acid
  Variant (103)..(112): Xaa in position 103 to 112 is any amino acid
  Variant (115)..(117): Xaa in position 115 to 117 is any amino acid
  Variant (119)..(119): Xaa in position 119 is any amino acid
  Variant (121)..(128): Xaa in position 121 to 128 is any amino acid
  Variant (130)..(130): Xaa in position 130 is any amino acid
  Variant (132)..(132): Xaa in position 132 is any amino acid
  Variant (134)..(134): Xaa in position 134 is any amino acid
  Variant (136)..(136): Xaa in position 136 is any amino acid
  Variant (139)..(142): Xaa in position 139 to 142 is any amino acid
  Variant (144)..(146): Xaa in position 144 to 146 is any amino acid
  Variant (148)..(152): Xaa in position 148 to 152 is any amino acid
  Variant (163)..(163): Xaa in position 163 is any amino acid
  Variant (166)..(167): Xaa in position 166 to 167 is any amino acid
  Variant (170)..(170): Xaa in position 170 is any amino acid
  Variant (173)..(173): Xaa in position 173 is any amino acid
  Variant (175)..(175): Xaa in position 175 is any amino acid
  Variant (180)..(180): Xaa in position 180 is any amino acid
  Variant (182)..(182): Xaa in position 182 is any amino acid
  Variant (184)..(187): Xaa in position 184 to 187 is any amino acid
  Variant (189)..(190): Xaa in position 189 to 190 is any amino acid
  Variant (192)..(194): Xaa in position 192 to 194 is any amino acid
  Variant (196)..(198): Xaa in position 196 to 198 is any amino acid
  Variant (200)..(200): Xaa in position 200 is any amino acid
  Variant (202)..(207): Xaa in position 202 to 207 is any amino acid
  Variant (209)..(214): Xaa in position 209 to 214 is any amino acid
  Variant (216)..(216): Xaa in position 216 is any amino acid
  Variant (219)..(221): Xaa in position 219 to 221 is any amino acid
  Variant (223)..(224): Xaa in position 223 to 224 is any amino acid
  Variant (229)..(237): Xaa in position 229 to 237 is any amino acid
  Variant (240)..(268): Xaa in position 240 to 268 is any amino acid
  Variant (270)..(270): Xaa in position 270 is any amino acid
  Variant (273)..(273): Xaa in position 273 is any amino acid
  Variant (276)..(276): Xaa in position 276 is any amino acid
  Variant (278)..(281): Xaa in position 278 to 281 is any amino acid
  Variant (283)..(284): Xaa in position 283 to 284 is any amino acid
  Variant (286)..(291): Xaa in position 286 to 291 is any amino acid
  Variant (293)..(295): Xaa in position 293 to 295 is any amino acid
  Variant (297)..(304): Xaa in position 297 to 304 is any amino acid
  Variant (306)..(306): Xaa in position 306 is any amino acid
  Variant (308)..(308): Xaa in position 308 is any amino acid
  Variant (311)..(314): Xaa in position 311 to 314 is any amino acid
  Variant (316)..(316): Xaa in position 316 is any amino acid
  Variant (318)..(333): Xaa in position 318 to 333 is any amino acid
  Variant (336)..(336): Xaa in position 336 is any amino acid
  Variant (338)..(338): Xaa in position 338 is any amino acid
  Variant (341)..(341): Xaa in position 341 is any amino acid
  Variant (343)..(344): Xaa in position 343 to 344 is any amino acid
  Variant (346)..(347): Xaa in position 346 to 347 is any amino acid
  Variant (349)..(351): Xaa in position 349 to 351 is any amino acid

SEQ ID NO: 68830 - protein, 24 aa, Artificial sequence
  Consensus
  Variant (2)..(2): Xaa in position 2 is any amino acid
  Variant (3)..(3): Xaa in position 3 is Leu, Val, Phe, Ile, Ala or Met
  Variant (4)..(4): Xaa in position 4 is Val, Ile, Leu or Ala
  Variant (5)..(5): Xaa in position 5 is Val or Ile
  Variant (6)..(6): Xaa in position 6 is Val, Ile, Cys or Thr
  Variant (11)..(11): Xaa in position 11 is Ile, Val, Ser or Leu
  Variant (12)..(12): Xaa in position 12 is His or Asp
  Variant (13)..(13): Xaa in position 13 is Asp or Asn
  Variant (14)..(15): Xaa in position 14 to 15 is any amino acid
  Variant (16)..(16): Xaa in position 16 is Ala, Ser, Gln or Thr
  Variant (17)..(17): Xaa in position 17 is Ala, Val or Gly
  Variant (18)..(18): Xaa in position 18 is any amino acid
  Variant (19)..(19): Xaa in position 19 is Glu, Asp, Ala or Gln
  Variant (21)..(21): Xaa in position 21 is Ala, Gly, Cys or Ser
  Variant (22)..(22): Xaa in position 22 is any amino acid
  Variant (23)..(23): Xaa in position 23 is Arg, Lys, Gln, His or Leu
  Variant (24)..(24): Xaa in position 24 is Leu, Ile or Phe
RXXXXXGPCSXXXXXXXXXYXXXX

SEQ ID NO: 68831 - protein, 42 aa, Artificial sequence; identical to SEQ ID NO: 2884
  Consensus
  Variant (1)..(1): Xaa in position 1 is Leu, Ile, Phe or Met
  Variant (2)..(2): Xaa in position 2 is any amino acid
  Variant (3)..(3): Xaa in position 3 is Ile, Val, Leu or Met
  Variant (4)..(4): Xaa in position 4 is Val, Ile or Leu
  Variant (7)..(7): Xaa in position 7 is Val, Ala or Thr
  Variant (9)..(9): Xaa in position 9 is Phe, Leu, Thr or Val
  Variant (10)..(10): Xaa in position 10 is Glu or Ala
  Variant (15)..(16): Xaa in position 15 to 16 is any amino acid
  Variant (17)..(17): Xaa in position 17 is any or no amino acid
  Variant (19)..(19): Xaa in position 19 is Trp or Tyr
  Variant (20)..(20): Xaa in position 20 is Lys or Arg
  Variant (22)..(22): Xaa in position 22 is Leu, Phe, Met or Tyr
  Variant (23)..(23): Xaa in position 23 is Ile, Val, Ala or Leu
  Variant (24)..(24): Xaa in position 24 is any amino acid
  Variant (25)..(25): Xaa in position 25 is Asp, Glu or Gln
  Variant (27)..(27): Xaa in position 27 is any amino acid
  Variant (28)..(28): Xaa in position 28 is Leu, Met, Ile, Val, Ala or Thr
  Variant (29)..(29): Xaa in position 29 is Asp, Asn or Ser
  Variant (30)..(33): Xaa in position 30 to 33 is any amino acid
  Variant (34)..(34): Xaa in position 34 is Ile, Val, Leu or Met
  Variant (35)..(36): Xaa in position 35 to 36 is any amino acid
  Variant (38)..(38): Xaa in position 38 is Leu, Ile, Met or Val
  Variant (39)..(40): Xaa in position 39 to 40 is any amino acid
  Variant (41)..(41): Xaa in position 41 is Ala, Ser, Gly, Val or Thr

SEQ ID NO: 68832 - protein, 65 aa, Artificial sequence; identical to SEQ ID NO: 2885
  Consensus
  Variant (2)..(2): Xaa in position 2 is any amino acid
  Variant (4)..(4): Xaa in position 4 is Asp, Tyr, Gln, Asn or Glu
  Variant (5)..(9): Xaa in position 5 to 9 is any amino acid
  Variant (10)..(10): Xaa in position 10 is Tyr, Phe or Leu
  Variant (11)..(12): Xaa in position 11 to 12 is any amino acid
  Variant (13)..(13): Xaa in position 13 is Asp or Glu
  Variant (14)..(15): Xaa in position 14 to 15 is any amino acid
  Variant (16)..(16): Xaa in position 16 is Ser, Ala, Thr or Cys
  Variant (17)..(17): Xaa in position 17 is Trp, Phe, Tyr, Leu or Val
  Variant (18)..(18): Xaa in position 18 is any amino acid
  Variant (19)..(19): Xaa in position 19 is Ala or Ser
  Variant (20)..(20): Xaa in position 20 is Ile or Val
  Variant (24)..(24): Xaa in position 24 is Thr, Ser or Asn
  Variant (25)..(25): Xaa in position 25 is Thr, Val, Ala, Ser or Ile
  Variant (26)..(26): Xaa in position 26 is Glu or Ala
  Variant (27)..(27): Xaa in position 27 is Ser, Asp or Asn
  Variant (29)..(29): Xaa in position 29 is any amino acid
  Variant (32)..(32): Xaa in position 32 is Glu, Gln, Phe or Met
  Variant (33)..(33): Xaa in position 33 is Leu, Met, Val, Ile or Phe
  Variant (34)..(34): Xaa in position 34 is Ala, Ser, Thr, Cys or Val
  Variant (36)..(36): Xaa in position 36 is Gly, Ala or Asn
  Variant (37)..(39): Xaa in position 37 to 39 is any amino acid
  Variant (40)..(40): Xaa in position 40 is Pro or Ala
  Variant (41)..(41): Xaa in position 41 is Val, Ile, Thr or Leu
  Variant (43)..(43): Xaa in position 43 is Phe, Met, Tyr or Ile
  Variant (46)..(46): Xaa in position 46 is any amino acid
  Variant (47)..(47): Xaa in position 47 is Thr, Ser or Arg
  Variant (48)..(48): Xaa in position 48 is any amino acid
  Variant (50)..(53): Xaa in position 50 to 53 is any amino acid
  Variant (54)..(54): Xaa in position 54 is Ala or Met
  Variant (55)..(55): Xaa in position 55 is any amino acid
  Variant (56)..(56): Xaa in position 56 is Asp, Asn or Glu
  Variant (57)..(57): Xaa in position 57 is Ala or Gly
  Variant (58)..(59): Xaa in position 58 to 59 is any amino acid
  Variant (60)..(60): Xaa in position 60 is Ala or Ser
  Variant (61)..(61): Xaa in position 61 is Ala, Ser, Val or Thr
  Variant (62)..(64): Xaa in position 62 to 64 is any amino acid
  Variant (65)..(65): Xaa in position 65 is His or Gln

SEQ ID NO: 68833 - protein, 71 aa, Artificial sequence; identical to SEQ ID NO: 2886
  Consensus
  Variant (1)..(1): Xaa in position 1 is Thr or Ser
  Variant (2)..(2): Xaa in position 2 is any amino acid
  Variant (5)..(7): Xaa in position 5 to 7 is any amino acid
  Variant (8)..(8): Xaa in position 8 is His or Phe
  Variant (9)..(9): Xaa in position 9 is Val, Ile, Leu or Ala
  Variant (10)..(10): Xaa in position 10 is Ile or Val
  Variant (11)..(11): Xaa in position 11 is Leu or Met
  Variant (14)..(14): Xaa in position 14 is Gly, Ser or Ala
  Variant (15)..(16): Xaa in position 15 to 16 is any amino acid
  Variant (17)..(22): Xaa in position 17 to 22 is any or no amino acid
  Variant (23)..(23): Xaa in position 23 is Pro, Thr or Ser
  Variant (25)..(25): Xaa in position 25 is Tyr, Phe or His
  Variant (26)..(29): Xaa in position 26 to 29 is any amino acid
  Variant (30)..(30): Xaa in position 30 is Val, Ile or Leu
  Variant (31)..(36): Xaa in position 31 to 36 is any amino acid
  Variant (37)..(37): Xaa in position 37 is Leu, Met, Ile, Tyr or His
  Variant (38)..(40): Xaa in position 38 to 40 is any amino acid
  Variant (41)..(51): Xaa in position 41 to 51 is any or no amino acid
  Variant (52)..(52): Xaa in position 52 is Leu, Ile or Val
  Variant (53)..(53): Xaa in position 53 is Met, Val, Ile or Leu
  Variant (54)..(54): Xaa in position 54 is Ile or Val
  Variant (56)..(56): Xaa in position 56 is Cys, Phe, Ala, Thr, Tyr or Val
  Variant (57)..(57): Xaa in position 57 is Ser, Asn or Ala
  Variant (59)..(59): Xaa in position 59 is Gly, Ala or Asp
  Variant (61)..(61): Xaa in position 61 is Ser or Cys
  Variant (62)..(62): Xaa in position 62 is any amino acid
  Variant (64)..(66): Xaa in position 64 to 66 is any amino acid
  Variant (67)..(67): Xaa in position 67 is Arg, Asn, Lys, Leu or Glu
  Variant (69)..(70): Xaa in position 69 to 70 is any amino acid
  Variant (71)..(71): Xaa in position 71 is Val or Ile

SEQ ID NO: 68834 - protein, 41 aa, Artificial sequence; identical to SEQ ID NO: 2887
  Consensus
  Variant (2)..(2): Xaa in position 2 is any amino acid
  Variant (4)..(4): Xaa in position 4 is Ile, Leu, Val, Ala or Met
  Variant (7)..(7): Xaa in position 7 is His, Asn, Phe or Tyr
  Variant (8)..(8): Xaa in position 8 is Leu or Ile
  Variant (9)..(10): Xaa in position 9 to 10 is any amino acid
  Variant (12)..(12): Xaa in position 12 is any amino acid
  Variant (14)..(19): Xaa in position 14 to 19 is any amino acid
  Variant (20)..(30): Xaa in position 20 to 30 is any or no amino acid
  Variant (32)..(32): Xaa in position 32 is any amino acid
  Variant (34)..(34): Xaa in position 34 is Ile or Val
  Variant (37)..(37): Xaa in position 37 is Ala, Pro, Gly, Lys, Ser or Glu
  Variant (39)..(39): Xaa in position 39 is Ile, Leu or Val
  Variant (40)..(40): Xaa in position 40 is any amino acid
  Variant (41)..(41): Xaa in position 41 is Trp, Ile, Leu or Phe

SEQ ID NO: 68835 - DNA, 900 bp, Escherichia coli; identical to SEQ ID NO: 49564
  CDS (1)..(900)

SEQ ID NO: 68836 - protein, 299 aa, Escherichia coli; identical to SEQ ID NO: 49565

SEQ ID NO: 68837 - DNA, 1005 bp, Xenopus tropicalis; identical to SEQ ID NO: 49566
  CDS (1)..(1005)

SEQ ID NO: 68838 - protein, 334 aa, Xenopus tropicalis; identical to SEQ ID NO: 49567

SEQ ID NO: 68839 - DNA, 858 bp, Archaeoglobus fulgidus DSM 4304; identical to SEQ ID NO: 49568
  CDS (1)..(858): transl_table=11

SEQ ID NO: 68840 - protein, 285 aa, Archaeoglobus fulgidus DSM 4304; identical to SEQ ID NO: 49569

SEQ ID NO: 68841 - DNA, 879 bp, Mesorhizobium loti MAFF303099; identical to SEQ ID NO: 49570
  CDS (1)..(879): transl_table=11

SEQ ID NO: 68842 - protein, 292 aa, Mesorhizobium loti MAFF303099; identical to SEQ ID NO: 49571

SEQ ID NO: 68843 - DNA, 843 bp, Thermoplasma volcanium GSS1; identical to SEQ ID NO: 49572
  CDS (1)..(843): transl_table=11

SEQ ID NO: 68844 - protein, 280 aa, Thermoplasma volcanium GSS1; identical to SEQ ID NO: 49573

SEQ ID NO: 68845 - DNA, 852 bp, Pyrococcus abyssi GE5; identical to SEQ ID NO: 49574
  CDS (1)..(852): transl_table=11

SEQ ID NO: 68846 - protein, 283 aa, Pyrococcus abyssi GE5; identical to SEQ ID NO: 49575

SEQ ID NO: 68847 - DNA, 873 bp, Pyrococcus horikoshii OT3; identical to SEQ ID NO: 49576
  CDS (1)..(873): transl_table=11

SEQ ID NO: 68848 - protein, 290 aa, Pyrococcus horikoshii OT3; identical to SEQ ID NO: 49577

SEQ ID NO: 68849 - DNA, 918 bp, Aeropyrum pernix K1; identical to SEQ ID NO: 49578
  CDS (1)..(918): transl_table=11

SEQ ID NO: 68850 - protein, 305 aa, Aeropyrum pernix K1; identical to SEQ ID NO: 49579

SEQ ID NO: 68851 - DNA, 720 bp, Clostridium acetobutylicum ATCC 824; identical to SEQ ID NO: 49580
  CDS (1)..(720): transl_table=11

SEQ ID NO: 68852 - protein, 239 aa, Clostridium acetobutylicum ATCC 824; identical to SEQ ID NO: 49581

SEQ ID NO: 68853 - DNA, 852 bp, Bacillus halodurans C-125; identical to SEQ ID NO: 49582
  CDS (1)..(852): transl_table=11

SEQ ID NO: 68854 - protein, 283 aa, Bacillus halodurans C-125; identical to SEQ ID NO: 49583

SEQ ID NO: 68855 - DNA, 909 bp, Pseudomonas aeruginosa PAO1; identical to SEQ ID NO: 49584
  CDS (1)..(909): transl_table=11

SEQ ID NO: 68856 - protein, 302 aa, Pseudomonas aeruginosa PAO1; identical to SEQ ID NO: 49585

SEQ ID NO: 68857 - DNA, 900 bp, Lactococcus lactis subsp. lactis Il1403; identical to SEQ ID NO: 49586
  CDS (1)..(900): transl_table=11

SEQ ID NO: 68858 - protein, 299 aa, Lactococcus lactis subsp. lactis Il1403; identical to SEQ ID NO: 49587

SEQ ID NO: 68859 - DNA, 921 bp, Neisseria meningitidis MC58; identical to SEQ ID NO: 49588
  CDS (1)..(921): transl_table=11

SEQ ID NO: 68860 - protein, 306 aa, Neisseria meningitidis MC58; identical to SEQ ID NO: 49589

SEQ ID NO: 68861 - DNA, 843 bp, Methanothermobacter thermautotrophicus str. Delta H; identical to SEQ ID NO: 49590
  CDS (1)..(843)

SEQ ID NO: 68862 - protein, 280 aa, Methanothermobacter thermautotrophicus str. Delta H; identical to SEQ ID NO: 49591

SEQ ID NO: 68863 - DNA, 864 bp, Neisseria meningitidis Z2491; identical to SEQ ID NO: 49592
  CDS (1)..(864): transl_table=11

SEQ ID NO: 68864 - protein, 287 aa, Neisseria meningitidis Z2491; identical to SEQ ID NO: 49593

SEQ ID NO: 68865 - DNA, 909 bp, Xylella fastidiosa 9a5c; identical to SEQ ID NO: 49594
  CDS (1)..(909): transl_table=11

SEQ ID NO: 68866 - protein, 302 aa, Xylella fastidiosa 9a5c; identical to SEQ ID NO: 49595

SEQ ID NO: 68867 - DNA, 915 bp, Mycobacterium tuberculosis CDC1551; identical to SEQ ID NO: 49596
  CDS (1)..(915): transl_table=11

SEQ ID NO: 68868 - protein, 304 aa, Mycobacterium tuberculosis CDC1551; identical to SEQ ID NO: 49597

SEQ ID NO: 68869 - DNA, 681 bp, Sulfolobus solfataricus P2; identical to SEQ ID NO: 49598
  CDS (1)..(681): transl_table=11

SEQ ID NO: 68870 - protein, 226 aa, Sulfolobus solfataricus P2; identical to SEQ ID NO: 49599

SEQ ID NO: 68871 - DNA, 843 bp, Clostridium acetobutylicum ATCC 824; identical to SEQ ID NO: 49600
  CDS (1)..(843): transl_table=11

SEQ ID NO: 68872 - protein, 280 aa, Clostridium acetobutylicum ATCC 824; identical to SEQ ID NO: 49601

SEQ ID NO: 68873 - DNA, 822 bp, Sulfolobus tokodaii str. 7; identical to SEQ ID NO: 49602
  CDS (1)..(822): transl_table=11

SEQ ID NO: 68874 - protein, 273 aa, Sulfolobus tokodaii str. 7; identical to SEQ ID NO: 49603

SEQ ID NO: 68875 - DNA, 903 bp, Caulobacter crescentus CB15; identical to SEQ ID NO: 49604
  CDS (1)..(903): transl_table=11

SEQ ID NO: 68876 - protein, 300 aa, Caulobacter crescentus CB15; identical to SEQ ID NO: 49605

SEQ ID NO: 68877 - DNA, 882 bp, Caulobacter crescentus CB15; identical to SEQ ID NO: 49606
  CDS (1)..(882): transl_table=11

SEQ ID NO: 68878 - protein, 293 aa, Caulobacter crescentus CB15; identical to SEQ ID NO: 49607

SEQ ID NO: 68879 - DNA, 903 bp, Sinorhizobium meliloti 1021; identical to SEQ ID NO: 49608
  CDS (1)..(903): transl_table=11

SEQ ID NO: 68880 - protein, 300 aa, Sinorhizobium meliloti 1021; identical to SEQ ID NO: 49609

SEQ ID NO: 68881 - DNA, 843 bp, Synechocystis sp. PCC 6803; identical to SEQ ID NO: 49610
  CDS (1)..(843): transl_table=11

SEQ ID NO: 68882 - protein, 280 aa, Synechocystis sp. PCC 6803; identical to SEQ ID NO: 49611

SEQ ID NO: 68883 - DNA, 831 bp, Listeria monocytogenes EGD-e; identical to SEQ ID NO: 49612
  CDS (1)..(831): transl_table=11

SEQ ID NO: 68884 - protein, 276 aa, Listeria monocytogenes EGD-e; identical to SEQ ID NO: 49613

SEQ ID NO: 68885 - DNA, 885 bp, Nostoc sp. PCC 7120; identical to SEQ ID NO: 49614
  CDS (1)..(885): transl_table=11

SEQ ID NO: 68886 - protein, 294 aa, Nostoc sp. PCC 7120; identical to SEQ ID NO: 49615

SEQ ID NO: 68887 - DNA, 918 bp, Ralstonia solanacearum GMI1000; identical to SEQ ID NO: 49616
  CDS (1)..(918): transl_table=11

SEQ ID NO: 68888 - protein, 305 aa, Ralstonia solanacearum GMI1000; identical to SEQ ID NO: 49617

SEQ ID NO: 68889 - DNA, 894 bp, Agrobacterium tumefaciens str. C58; identical to SEQ ID NO: 49618
  CDS (1)..(894): transl_table=11

SEQ ID NO: 68890 - protein, 297 aa, Agrobacterium tumefaciens str. C58; identical to SEQ ID NO: 49619

SEQ ID NO: 68891 - DNA, 885 bp, Clostridium perfringens str. 13; identical to SEQ ID NO: 49620
  CDS (1)..(885): transl_table=11

SEQ ID NO: 68892 - protein, 294 aa, Clostridium perfringens str. 13; identical to SEQ ID NO: 49621

SEQ ID NO: 68893 - DNA, 1362 bp, Corynebacterium glutamicum ATCC 13032; identical to SEQ ID NO: 49622
  CDS (1)..(1362): transl_table=11

SEQ ID NO: 68894 - protein, 453 aa, Corynebacterium glutamicum ATCC 13032; identical to SEQ ID NO: 49623

SEQ ID NO: 68895 - DNA, 855 bp, Streptococcus pyogenes MGAS8232; identical to SEQ ID NO: 49624
  CDS (1)..(855): transl_table=11

SEQ ID NO: 68896 - protein, 284 aa, Streptococcus pyogenes MGAS8232; identical to SEQ ID NO: 49625

SEQ ID NO: 68897 - DNA, 810 bp, Methanosarcina mazei Go1; identical to SEQ ID NO: 49626
  CDS (1)..(810): transl_table=11

SEQ ID NO: 68898 - protein, 269 aa, Methanosarcina mazei Go1; identical to SEQ ID NO: 49627

SEQ ID NO: 68899 - DNA, 909 bp, Xanthomonas campestris pv. campestris str. ATCC 33913; identical to SEQ ID NO: 49628
  CDS (1)..(909): transl_table=11

SEQ ID NO: 68900 - protein, 302 aa, Xanthomonas campestris pv. campestris str. ATCC 33913; identical to SEQ ID NO: 49629

SEQ ID NO: 68901 - DNA, 900 bp, Xanthomonas axonopodis pv. citri str. 306; identical to SEQ ID NO: 49630
  CDS (1)..(900): transl_table=11

SEQ ID NO: 68902 - protein, 299 aa, Xanthomonas axonopodis pv. citri str. 306; identical to SEQ ID NO: 49631

SEQ ID NO: 68903 - DNA, 879 bp, Chlorobium tepidum TLS; identical to SEQ ID NO: 49632
  CDS (1)..(879): transl_table=11

SEQ ID NO: 68904 - protein, 292 aa, Chlorobium tepidum TLS; identical to SEQ ID NO: 49633

SEQ ID NO: 68905 - DNA, 915 bp, Thermosynechococcus elongatus BP-1; identical to SEQ ID NO: 49634
  CDS (1)..(915): transl_table=11

SEQ ID NO: 68906 - protein, 304 aa, Thermosynechococcus elongatus BP-1; identical to SEQ ID NO: 49635

SEQ ID NO: 68907 - DNA, 855 bp, Streptococcus agalactiae 2603V/R; identical to SEQ ID NO: 49636
  CDS (1)..(855): transl_table=11

SEQ ID NO: 68908 - protein, 284 aa, Streptococcus agalactiae 2603V/R; identical to SEQ ID NO: 49637

SEQ ID NO: 68909 - DNA, 849 bp, Oceanobacillus iheyensis HTE831; identical to SEQ ID NO: 49638
  CDS (1)..(849): transl_table=11

SEQ ID NO: 68910 - protein, 282 aa, Oceanobacillus iheyensis HTE831; identical to SEQ ID NO: 49639

SEQ ID NO: 68911 - DNA, 1443 bp, Bifidobacterium longum NCC2705; identical to SEQ ID NO: 49640
  CDS (1)..(1443): transl_table=11

SEQ ID NO: 68912 - protein, 480 aa, Bifidobacterium longum NCC2705; identical to SEQ ID NO: 49641

SEQ ID NO: 68913 - DNA, 921 bp, Leptospira interrogans serovar Lai str. 56601; identical to SEQ ID NO: 49642
  CDS (1)..(921): transl_table=11

SEQ ID NO: 68914 - protein, 306 aa, Leptospira interrogans serovar Lai str. 56601; identical to SEQ ID NO: 49643

SEQ ID NO: 68915 - DNA, 987 bp, Shewanella oneidensis MR-1; identical to SEQ ID NO: 49644
  CDS (1)..(987): transl_table=11

SEQ ID NO: 68916 - protein, 328 aa, Shewanella oneidensis MR-1; identical to SEQ ID NO: 49645

SEQ ID NO: 68917 - DNA, 921 bp, Shewanella oneidensis MR-1; identical to SEQ ID NO: 49646
  CDS (1)..(921): transl_table=11

SEQ ID NO: 68918 - protein, 306 aa, Shewanella oneidensis MR-1; identical to SEQ ID NO: 49647

SEQ ID NO: 68919 - DNA, 855 bp, Streptococcus mutans UA159; identical to SEQ ID NO: 49648
  CDS (1)..(855): transl_table=11

SEQ ID NO: 68920 - protein, 284 aa, Streptococcus mutans UA159; identical to SEQ ID NO: 49649

SEQ ID NO: 68921 - DNA, 855 bp, Streptococcus agalactiae NEM316; identical to SEQ ID NO: 49650
  CDS (1)..(855): transl_table=11

SEQ ID NO: 68922 - protein, 284 aa, Streptococcus agalactiae NEM316; identical to SEQ ID NO: 49651

SEQ ID NO: 68923 - DNA, 1380 bp, Corynebacterium efficiens YS-314; identical to SEQ ID NO: 49652
  CDS (1)..(1380): transl_table=11

SEQ ID NO: 68924 - protein, 459 aa, Corynebacterium efficiens YS-314; identical to SEQ ID NO: 49653

SEQ ID NO: 68925 - DNA, 903 bp, Pseudomonas putida KT2440; identical to SEQ ID NO: 49654
  CDS (1)..(903): transl_table=11

SEQ ID NO: 68926 - protein, 300 aa, Pseudomonas putida KT2440; identical to SEQ ID NO: 49655

SEQ ID NO: 68927 - DNA, 909 bp, Xylella fastidiosa Temecula1; identical to SEQ ID NO: 49656
  CDS (1)..(909): transl_table=11

SEQ ID NO: 68928 - protein, 302 aa, Xylella fastidiosa Temecula1; identical to SEQ ID NO: 49657

SEQ ID NO: 68929 - DNA, 843 bp, Lactobacillus plantarum WCFS1; identical to SEQ ID NO: 49658
  CDS (1)..(843): transl_table=11

SEQ ID NO: 68930 - protein, 280 aa, Lactobacillus plantarum WCFS1; identical to SEQ ID NO: 49659

SEQ ID NO: 68931 - DNA, 864 bp, Tropheryma whipplei str. Twist; identical to SEQ ID NO: 49660
  CDS (1)..(864): transl_table=11

SEQ ID NO: 68932 - protein, 287 aa, Tropheryma whipplei str. Twist; identical to SEQ ID NO: 49661

SEQ ID NO: 68933 - DNA, 906 bp, Pseudomonas syringae pv. tomato str. DC3000; identical to SEQ ID NO: 49662
  CDS (1)..(906): transl_table=11

SEQ ID NO: 68934 - protein, 301 aa, Pseudomonas syringae pv. tomato str. DC3000; identical to SEQ ID NO: 49663

SEQ ID NO: 68935 - DNA, 855 bp, Streptococcus pyogenes SSI-1; identical to SEQ ID NO: 49664
  CDS (1)..(855): transl_table=11

SEQ ID NO: 68936 - protein, 284 aa, Streptococcus pyogenes SSI-1; identical to SEQ ID NO: 49665

SEQ ID NO: 68937 - DNA, 855 bp, Bacteroides thetaiotaomicron VPI-5482; identical to SEQ ID NO: 49666
  CDS (1)..(855): transl_table=11

SEQ ID NO: 68938 - protein, 284 aa, Bacteroides thetaiotaomicron VPI-5482; identical to SEQ ID NO: 49667

SEQ ID NO: 68939 - DNA, 909 bp, Bacteroides thetaiotaomicron VPI-5482; identical to SEQ ID NO: 49668
  CDS (1)..(909): transl_table=11

SEQ ID NO: 68940 - protein, 302 aa, Bacteroides thetaiotaomicron VPI-5482; identical to SEQ ID NO: 49669

SEQ ID NO: 68941 - DNA, 849 bp, Bacteroides thetaiotaomicron VPI-5482; identical to SEQ ID NO: 49670
  CDS (1)..(849): transl_table=11

SEQ ID NO: 68942 - protein, 282 aa, Bacteroides thetaiotaomicron VPI-5482; identical to SEQ ID NO: 49671

SEQ ID NO: 68943 - DNA, 900 bp, Enterococcus faecalis V583; identical to SEQ ID NO: 49672
  CDS (1)..(900): transl_table=11

SEQ ID NO: 68944 - protein, 299 aa, Enterococcus faecalis V583; identical to SEQ ID NO: 49673

SEQ ID NO: 68945 - DNA, 855 bp, Bacillus cereus ATCC 14579; identical to SEQ ID NO: 49674
  CDS (1)..(855): transl_table=11

SEQ ID NO: 68946 - protein, 284 aa, Bacillus cereus ATCC 14579; identical to SEQ ID NO: 49675

SEQ ID NO: 68947 - DNA, 915 bp, Nitrosomonas europaea ATCC 19718; identical to SEQ ID NO: 49676
  CDS (1)..(915): transl_table=11

SEQ ID NO: 68948 - protein, 304 aa, Nitrosomonas europaea ATCC 19718; identical to SEQ ID NO: 49677

SEQ ID NO: 68949 - DNA, 855 bp, Bacillus anthracis str. Ames; identical to SEQ ID NO: 49678
  CDS (1)..(855): transl_table=11

SEQ ID NO: 68950 - protein, 284 aa, Bacillus anthracis str. Ames; identical to SEQ ID NO: 49679

SEQ ID NO: 68951 - DNA, 849 bp, Ruegeria sp. PR1b; identical to SEQ ID NO: 49680
  CDS (1)..(849): transl_table=11

SEQ ID NO: 68952 - protein, 282 aa, Ruegeria sp. PR1b; identical to SEQ ID NO: 49681

SEQ ID NO: 68953 - DNA, 897 bp, Bordetella pertussis Tohama I; identical to SEQ ID NO: 49682
  CDS (1)..(897): transl_table=11

SEQ ID NO: 68954 - protein, 298 aa, Bordetella pertussis Tohama I; identical to SEQ ID NO: 49683

SEQ ID NO: 68955 - DNA, 906 bp, Prochlorococcus marinus str. MIT 9313; identical to SEQ ID NO: 49684
  CDS (1)..(906): transl_table=11

SEQ ID NO: 68956 - protein, 301 aa, Prochlorococcus marinus str. MIT 9313; identical to SEQ ID NO: 49685

SEQ ID NO: 68957 - DNA, 909 bp, Synechococcus sp. WH 8102; identical to SEQ ID NO: 49686
  CDS (1)..(909): transl_table=11

SEQ ID NO: 68958 - protein, 302 aa, Synechococcus sp. WH 8102; identical to SEQ ID NO: 49687

SEQ ID NO: 68959 - DNA, 933 bp, Chromobacterium violaceum ATCC 12472; identical to SEQ ID NO: 49688
  CDS (1)..(933): transl_table=11

SEQ ID NO: 68960 - protein, 310 aa, Chromobacterium violaceum ATCC 12472; identical to SEQ ID NO: 49689

SEQ ID NO: 68961 - DNA, 858 bp, Porphyromonas gingivalis W83; identical to SEQ ID NO: 49690
  CDS (1)..(858): transl_table=11

SEQ ID NO: 68962 - protein, 285 aa, Porphyromonas gingivalis W83; identical to SEQ ID NO: 49691

SEQ ID NO: 68963 - DNA, 903 bp, Gloeobacter violaceus PCC 7421; identical to SEQ ID NO: 49692
  CDS (1)..(903): transl_table=11

SEQ ID NO: 68964 - protein, 300 aa, Gloeobacter violaceus PCC 7421; identical to SEQ ID NO: 49693

SEQ ID NO: 68965 - DNA, 882 bp, Vibrio vulnificus YJ016; identical to SEQ ID NO: 49694
  CDS (1)..(882): transl_table=11

SEQ ID NO: 68966 - protein, 293 aa, Vibrio vulnificus YJ016; identical to SEQ ID NO: 49695

SEQ ID NO: 68967 - DNA, 1347 bp, Corynebacterium diphtheriae NCTC 13129; identical to SEQ ID NO: 49696
  CDS (1)..(1347): transl_table=11

SEQ ID NO: 68968 - protein, 448 aa, Corynebacterium diphtheriae NCTC 13129; identical to SEQ ID NO: 49697

SEQ ID NO: 68969 - DNA, 894 bp, Rhodopseudomonas palustris CGA009; identical to SEQ ID NO: 49698
  CDS (1)..(894): transl_table=11

SEQ ID NO: 68970 - protein, 297 aa, Rhodopseudomonas palustris CGA009; identical to SEQ ID NO: 49699

SEQ ID NO: 68971 - DNA, 843 bp, Geobacter sulfurreducens PCA; identical to SEQ ID NO: 49700
  CDS (1)..(843): transl_table=11

SEQ ID NO: 68972 - protein, 280 aa, Geobacter sulfurreducens PCA; identical to SEQ ID NO: 49701

SEQ ID NO: 68973 - DNA, 924 bp, Mycobacterium avium subsp. paratuberculosis K-10; identical to SEQ ID NO: 49702
  CDS (1)..(924): transl_table=11

SEQ ID NO: 68974 - protein, 307 aa, Mycobacterium avium subsp. paratuberculosis K-10; identical to SEQ ID NO: 49703

SEQ ID NO: 68975 - DNA, 987 bp, Lactobacillus johnsonii NCC 533; identical to SEQ ID NO: 49704
  CDS (1)..(987): transl_table=11

SEQ ID NO: 68976 - protein, 328 aa, Lactobacillus johnsonii NCC 533; identical to SEQ ID NO: 49705

SEQ ID NO: 68977 - DNA, 921 bp, Leptospira interrogans serovar Copenhageni str. Fiocruz L1-130; identical to SEQ ID NO: 49706
  CDS (1)..(921): transl_table=11

SEQ ID NO: 68978 - protein, 306 aa, Leptospira interrogans serovar Copenhageni str. Fiocruz L1-130; identical to SEQ ID NO: 49707

SEQ ID NO: 68979 - DNA, 885 bp, Parachlamydia sp. UWE25; identical to SEQ ID NO: 49708
  CDS (1)..(885): transl_table=11

SEQ ID NO: 68980 - protein, 294 aa, Parachlamydia sp. UWE25; identical to SEQ ID NO: 49709

SEQ ID NO: 68981 - DNA, 876 bp, Desulfovibrio vulgaris subsp. vulgaris str. Hildenborough; identical to SEQ ID NO: 49710
  CDS (1)..(876): transl_table=11

SEQ ID NO: 68982 - protein, 291 aa, Desulfovibrio vulgaris subsp. vulgaris str. Hildenborough; identical to SEQ ID NO: 49711

SEQ ID NO: 68983 - DNA, 810 bp, Picrophilus torridus DSM 9790; identical to SEQ ID NO: 49712
  CDS (1)..(810): transl_table=11

SEQ ID NO: 68984 - protein, 269 aa, Picrophilus torridus DSM 9790; identical to SEQ ID NO: 49713

SEQ ID NO: 68985 - DNA, 909 bp, Acinetobacter sp. ADP1; identical to SEQ ID NO: 49714
  CDS (1)..(909): transl_table=11

SEQ ID NO: 68986 - protein, 302 aa, Acinetobacter sp. ADP1; identical to SEQ ID NO: 49715

SEQ ID NO: 68987 - DNA, 852 bp, Erwinia carotovora subsp. atroseptica SCRI1043; identical to SEQ ID NO: 49716
  CDS (1)..(852): transl_table=11

SEQ ID NO: 68988 - protein, 283 aa, Erwinia carotovora subsp. atroseptica SCRI1043; identical to SEQ ID NO: 49717

SEQ ID NO: 68989 - DNA, 855 bp, Streptococcus pyogenes MGAS10394; identical to SEQ ID NO: 49718
  CDS (1)..(855): transl_table=11

SEQ ID NO: 68990 - protein, 284 aa, Streptococcus pyogenes MGAS10394; identical to SEQ ID NO: 49719

SEQ ID NO: 68991 - DNA, 888 bp, Leifsonia xyli subsp. xyli str. CTCB07; identical to SEQ ID NO: 49720
  CDS (1)..(888): transl_table=11

SEQ ID NO: 68992 - protein, 295 aa, Leifsonia xyli subsp. xyli str. CTCB07; identical to SEQ ID NO: 49721

SEQ ID NO: 68993 - DNA, 855 bp, Bacillus cereus E33L; identical to SEQ ID NO: 49722
  CDS (1)..(855): transl_table=11

SEQ ID NO: 68994 - protein, 284 aa, Bacillus cereus E33L; identical to SEQ ID NO: 49723

SEQ ID NO: 68995 - DNA, 885 bp, Legionella pneumophila subsp. pneumophila str. Philadelphia 1; identical to SEQ ID NO: 49724
  CDS (1)..(885): transl_table=11

SEQ ID NO: 68996 - protein, 294 aa, Legionella pneumophila subsp. pneumophila str. Philadelphia 1; identical to SEQ ID NO: 49725

SEQ ID NO: 68997 - DNA, 891 bp, Bacteroides fragilis YCH46; identical to SEQ ID NO: 49726
  CDS (1)..(891): transl_table=11

SEQ ID NO: 68998 - protein, 296 aa, Bacteroides fragilis YCH46; identical to SEQ ID NO: 49727

SEQ ID NO: 68999 - DNA, 897 bp, Burkholderia mallei ATCC 23344; identical to SEQ ID NO: 49728
  CDS (1)..(897): transl_table=11

SEQ ID NO: 69000 - protein, 298 aa, Burkholderia mallei ATCC 23344; identical to SEQ ID NO: 49729

SEQ ID NO: 69001 - DNA, 906 bp, Methylococcus capsulatus str. Bath; identical to SEQ ID NO: 49730
  CDS (1)..(906): transl_table=11

SEQ ID NO: 69002 - protein, 301 aa, Methylococcus capsulatus str. Bath; identical to SEQ ID NO: 49731

SEQ ID NO: 69003 - DNA, 858 bp, Nocardia farcinica IFM 10152; identical to SEQ ID NO: 49732
  CDS (1)..(858): transl_table=11

SEQ ID NO: 69004 - protein, 285 aa, Nocardia farcinica IFM 10152; identical to SEQ ID NO: 49733

SEQ ID NO: 69005 - DNA, 885 bp, Legionella pneumophila str. Lens; identical to SEQ ID NO: 49734
  CDS (1)..(885): transl_table=11

SEQ ID NO: 69006 - protein, 294 aa, Legionella pneumophila str. Lens; identical to SEQ ID NO: 49735

SEQ ID NO: 69007 - DNA, 873 bp, Streptococcus thermophilus LMG 18311; identical to SEQ ID NO: 49736
  CDS (1)..(873): transl_table=11

SEQ ID NO: 69008 - protein, 290 aa, Streptococcus thermophilus LMG 18311; identical to SEQ ID NO: 49737

SEQ ID NO: 69009 - DNA, 897 bp, Azoarcus sp. EbN1; identical to SEQ ID NO: 49738
  CDS (1)..(897): transl_table=11

SEQ ID NO: 69010 - protein, 298 aa, Azoarcus sp. EbN1; identical to SEQ ID NO: 49739

SEQ ID NO: 69011 - DNA, 870 bp, Synechococcus elongatus PCC 6301; identical to SEQ ID NO: 49740
  CDS (1)..(870): transl_table=11

SEQ ID NO: 69012 - protein, 289 aa, Synechococcus elongatus PCC 6301; identical to SEQ ID NO: 49741

SEQ ID NO: 69013 - DNA, 894 bp, Gluconobacter oxydans 621H; identical to SEQ ID NO: 49742
  CDS (1)..(894): transl_table=11

SEQ ID NO: 69014 - protein, 297 aa, Gluconobacter oxydans 621H; identical to SEQ ID NO: 49743

SEQ ID NO: 69015 - DNA, 909 bp, Xanthomonas oryzae pv. oryzae KACC10331; identical to SEQ ID NO: 49744
  CDS (1)..(909): transl_table=11

SEQ ID NO: 69016 - protein, 302 aa, Xanthomonas oryzae pv. oryzae KACC10331; identical to SEQ ID NO: 49745

SEQ ID NO: 69017 - DNA, 864 bp, Neisseria gonorrhoeae FA 1090; identical to SEQ ID NO: 49746
  CDS (1)..(864): transl_table=11

SEQ ID NO: 69018 - protein, 287 aa, Neisseria gonorrhoeae FA 1090; identical to SEQ ID NO: 49747

SEQ ID NO: 69019 - DNA, 864 bp, Bacteroides fragilis NCTC 9343; identical to SEQ ID NO: 49748
  CDS (1)..(864): transl_table=11

SEQ ID NO: 69020 - protein, 287 aa, Bacteroides fragilis NCTC 9343; identical to SEQ ID NO: 49749

SEQ ID NO: 69021 - DNA, 891 bp, Bacteroides fragilis NCTC 9343; identical to SEQ ID NO: 49750
  CDS (1)..(891): transl_table=11

SEQ ID NO: 69022 - protein, 296 aa, Bacteroides fragilis NCTC 9343; identical to SEQ ID NO: 49751

SEQ ID NO: 69023 - DNA, 849 bp, Sulfolobus acidocaldarius DSM 639; identical to SEQ ID NO: 49752
  CDS (1)..(849): transl_table=11

SEQ ID NO: 69024 - protein, 282 aa, Sulfolobus acidocaldarius DSM 639; identical to SEQ ID NO: 49753

SEQ ID NO: 69025 - DNA, 852 bp, Rhodobacter sphaeroides 2.4.1; identical to SEQ ID NO: 49754
  CDS (1)..(852)

SEQ ID NO: 69026 - protein, 283 aa, Rhodobacter sphaeroides 2.4.1; identical to SEQ ID NO: 49755

SEQ ID NO: 69027 - DNA, 891 bp, Nostoc punctiforme PCC 73102; identical to SEQ ID NO: 49756
  CDS (1)..(891)

SEQ ID NO: 69028 - protein, 296 aa, Nostoc punctiforme PCC 73102; identical to SEQ ID NO: 49757

SEQ ID NO: 69029 - DNA, 1452 bp, Bifidobacterium longum DJO10A; identical to SEQ ID NO: 49758
  CDS (1)..(1452)

SEQ ID NO: 69030 - protein, 483 aa, Bifidobacterium longum DJO10A; identical to SEQ ID NO: 49759

SEQ ID NO: 69031 - DNA, 909 bp, Pseudomonas aeruginosa UCBPP-PA14; identical to SEQ ID NO: 49760
  CDS (1)..(909)

SEQ ID NO: 69032 - protein, 302 aa, Pseudomonas aeruginosa UCBPP-PA14; identical to SEQ ID NO: 49761

SEQ ID NO: 69033 - DNA, 894 bp, Fusobacterium nucleatum subsp. vincentii ATCC 49256; identical to SEQ ID NO: 49762
  CDS (1)..(894): transl_table=11

SEQ ID NO: 69034 - protein, 297 aa, Fusobacterium nucleatum subsp. vincentii ATCC 49256; identical to SEQ ID NO: 49763

SEQ ID NO: 69035 - DNA, 891 bp, Anabaena variabilis ATCC 29413; identical to SEQ ID NO: 49764
  CDS (1)..(891)

SEQ ID NO: 69036 - protein, 296 aa, Anabaena variabilis ATCC 29413; identical to SEQ ID NO: 49765

SEQ ID NO: 69037 - DNA, 915 bp, Ralstonia eutropha JMP134; identical to SEQ ID NO: 49766
  CDS (1)..(915)

SEQ ID NO: 69038 - protein, 304 aa, Ralstonia eutropha JMP134; identical to SEQ ID NO: 49767

SEQ ID NO: 69039 - DNA, 897 bp, Rubrivivax gelatinosus PM1; identical to SEQ ID NO: 49768
  CDS (1)..(897)

SEQ ID NO: 69040 - protein, 298 aa, Rubrivivax gelatinosus PM1; identical to SEQ ID NO: 49769

SEQ ID NO: 69041 - DNA, 837 bp, Burkholderia fungorum LB400; identical to SEQ ID NO: 49770
  CDS (1)..(837)

SEQ ID NO: 69042 - protein, 278 aa, Burkholderia fungorum LB400; identical to SEQ ID NO: 49771

SEQ ID NO: 69043 - DNA, 906 bp, Psychrobacter sp. 273-4; identical to SEQ ID NO: 49772
  CDS (1)..(906)

SEQ ID NO: 69044 - protein, 301 aa, Psychrobacter sp. 273-4; identical to SEQ ID NO: 49773

SEQ ID NO: 69045 - DNA, 900 bp, Azotobacter vinelandii AvOP; identical to SEQ ID NO: 49774
  CDS (1)..(900): transl_table=11

SEQ ID NO: 69046 - protein, 299 aa, Azotobacter vinelandii AvOP; identical to SEQ ID NO: 49775

SEQ ID NO: 69047 - DNA, 885 bp, Burkholderia vietnamiensis G4; identical to SEQ ID NO: 49776
  CDS (1)..(885): transl_table=11

SEQ ID NO: 69048 - protein, 294 aa, Burkholderia vietnamiensis G4; identical to SEQ ID NO: 49777

SEQ ID NO: 69049 - DNA, 900 bp, Burkholderia cenocepacia AU 1054; identical to SEQ ID NO: 49778
  CDS (1)..(900): transl_table=11

SEQ ID NO: 69050 - protein, 299 aa, Burkholderia cenocepacia AU 1054; identical to SEQ ID NO: 49779

SEQ ID NO: 69051 - DNA, 975 bp, Polaromonas sp. JS666; identical to SEQ ID NO: 49780
  CDS (1)..(975): transl_table=11

SEQ ID NO: 69052 - protein, 324 aa, Polaromonas sp. JS666; identical to SEQ ID NO: 49781

SEQ ID NO: 69053 - DNA, 897 bp, Frankia sp. CcI3; identical to SEQ ID NO: 49782
  CDS (1)..(897): transl_table=11

SEQ ID NO: 69054 - protein, 298 aa, Frankia sp. CcI3; identical to SEQ ID NO: 49783

SEQ ID NO: 69055 - DNA, 810 bp, Methanococcoides burtonii DSM 6242; identical to SEQ ID NO: 49784
  CDS (1)..(810): transl_table=11

SEQ ID NO: 69056 - protein, 269 aa, Methanococcoides burtonii DSM 6242; identical to SEQ ID NO: 49785

SEQ ID NO: 69057 - DNA, 876 bp, Shewanella baltica OS155; identical to SEQ ID NO: 49786
  CDS (1)..(876): transl_table=11

SEQ ID NO: 69058 - protein, 291 aa, Shewanella baltica OS155; identical to SEQ ID NO: 49787

SEQ ID NO: 69059 - DNA, 906 bp, Shewanella amazonensis SB2B; identical to SEQ ID NO: 49788
  CDS (1)..(906): transl_table=11

SEQ ID NO: 69060 - protein, 301 aa, Shewanella amazonensis SB2B; identical to SEQ ID NO: 49789

SEQ ID NO: 69061 - DNA, 879 bp, Pelodictyon phaeoclathratiforme BU-1; identical to SEQ ID NO: 49790
  CDS (1)..(879): transl_table=11

SEQ ID NO: 69062 - protein, 292 aa, Pelodictyon phaeoclathratiforme BU-1; identical to SEQ ID NO: 49791

SEQ ID NO: 69063 - DNA, 921 bp, Ralstonia metallidurans CH34; identical to SEQ ID NO: 49792
  CDS (1)..(921): transl_table=11

SEQ ID NO: 69064 - protein, 306 aa, Ralstonia metallidurans CH34; identical to SEQ ID NO: 49793

SEQ ID NO: 69065 - DNA, 888 bp, Mesorhizobium sp. BNC1; identical to SEQ ID NO: 49794
  CDS (1)..(888): transl_table=11

SEQ ID NO: 69066 - protein, 295 aa, Mesorhizobium sp. BNC1; identical to SEQ ID NO: 49795

SEQ ID NO: 69067 - DNA, 915 bp, Nitrobacter hamburgensis X14; identical to SEQ ID NO: 49796
  CDS (1)..(915): transl_table=11

SEQ ID NO: 69068 - protein, 304 aa, Nitrobacter hamburgensis X14; identical to SEQ ID NO: 49797

SEQ ID NO: 69069 - DNA, 855 bp, Streptococcus mutans; identical to SEQ ID NO: 49798
  CDS (1)..(855): transl_table=11

SEQ ID NO: 69070 - protein, 284 aa, Streptococcus mutans; identical to SEQ ID NO: 49799

SEQ ID NO: 69071 - DNA, 867 bp, Serratia marcescens; identical to SEQ ID NO: 49800
  CDS (1)..(867): transl_table=11

SEQ ID NO: 69072 - protein, 288 aa, Serratia marcescens; identical to SEQ ID NO: 49801

SEQ ID NO: 69073 - DNA, 885 bp, Actinobacillus actinomycetemcomitans; identical to SEQ ID NO: 49802
  CDS (1)..(885): transl_table=11

SEQ ID NO: 69074 - protein, 294 aa, Actinobacillus actinomycetemcomitans; identical to SEQ ID NO: 49803

SEQ ID NO: 69075 - DNA, 918 bp, Streptomyces glaucescens; identical to SEQ ID NO: 49804
  CDS (1)..(918): transl_table=11

SEQ ID NO: 69076 - protein, 305 aa, Streptomyces glaucescens; identical to SEQ ID NO: 49805

SEQ ID NO: 69077 - DNA, 900 bp, Enterococcus faecalis; identical to SEQ ID NO: 49806
  CDS (1)..(900): transl_table=11

SEQ ID NO: 69078 - protein, 299 aa, Enterococcus faecalis; identical to SEQ ID NO: 49807

SEQ ID NO: 69079 - DNA, 867 bp, Sphingomonas sp; identical to SEQ ID NO: 49808
  CDS (1)..(867): transl_table=11

SEQ ID NO: 69080 - protein, 288 aa, Sphingomonas sp; identical to SEQ ID NO: 49809

SEQ ID NO: 69081 - DNA, 828 bp, Rhizobium meliloti; identical to SEQ ID NO: 49810
  CDS (1)..(828): transl_table=11

SEQ ID NO: 69082 - protein, 275 aa, Rhizobium meliloti; identical to SEQ ID NO: 49811

SEQ ID NO: 69083 - DNA, 891 bp, Azorhizobium caulinodans; identical to SEQ ID NO: 49812
  CDS (1)..(891): transl_table=11

SEQ ID NO: 69084 - protein, 296 aa, Azorhizobium caulinodans; identical to SEQ ID NO: 49813

SEQ ID NO: 69085 - DNA, 852 bp, Streptococcus pneumoniae; identical to SEQ ID NO: 49814
  CDS (1)..(852): transl_table=11

SEQ ID NO: 69086 - protein, 283 aa, Streptococcus pneumoniae; identical to SEQ ID NO: 49815

SEQ ID NO: 69087 - DNA, 852 bp, Streptococcus pneumoniae; identical to SEQ ID NO: 49816
  CDS (1)..(852): transl_table=11

SEQ ID NO: 69088 - protein, 283 aa, Streptococcus pneumoniae; identical to SEQ ID NO: 49817

SEQ ID NO: 69089 - DNA, 882 bp, Pseudomonas fluorescens; identical to SEQ ID NO: 49818
  CDS (1)..(882): transl_table=11

SEQ ID NO: 69090 - protein, 293 aa, Pseudomonas fluorescens; identical to SEQ ID NO: 49819

SEQ ID NO: 69091 - DNA, 1005 bp, Xenopus laevis; identical to SEQ ID NO: 49820
  CDS (1)..(1005)

SEQ ID NO: 69092 - protein, 334 aa, Xenopus laevis; identical to SEQ ID NO: 49821

SEQ ID NO: 69093 - DNA, 900 bp, Shigella boydii; identical to SEQ ID NO: 49822
  CDS (1)..(900): transl_table=11

SEQ ID NO: 69094 - protein, 299 aa, Shigella boydii; identical to SEQ ID NO: 49823

SEQ ID NO: 69095 - DNA, 915 bp, Streptomyces griseus subsp; identical to SEQ ID NO: 49824
  CDS (1)..(915): transl_table=11

SEQ ID NO: 69096 - protein, 304 aa, Streptomyces griseus subsp; identical to SEQ ID NO: 49825

SEQ ID NO: 69097 - DNA, 924 bp, Saccharopolyspora erythraea; identical to SEQ ID NO: 49826
  CDS (1)..(924): transl_table=11

SEQ ID NO: 69098 - protein, 307 aa, Saccharopolyspora erythraea; identical to SEQ ID NO: 49827

SEQ ID NO: 69099 - DNA, 909 bp, Xanthomonas campestris pv; identical to SEQ ID NO: 49828
  CDS (1)..(909): transl_table=11

SEQ ID NO: 69100 - protein, 302 aa, Xanthomonas campestris pv; identical to SEQ ID NO: 49829

SEQ ID NO: 69101 - DNA, 870 bp, Yersinia enterocolitica; identical to SEQ ID NO: 49830
  CDS (1)..(870): transl_table=11

SEQ ID NO: 69102 - protein, 289 aa, Yersinia enterocolitica; identical to SEQ ID NO: 49831

SEQ ID NO: 69103 - DNA, 843 bp, Lactobacillus rhamnosus; identical to SEQ ID NO: 49832
  CDS (1)..(843): transl_table=11

SEQ ID NO: 69104 - protein, 280 aa, Lactobacillus rhamnosus; identical to SEQ ID NO: 49833

SEQ ID NO: 69105 - DNA, 843 bp, Lactobacillus rhamnosus; identical to SEQ ID NO: 49834
  CDS (1)..(843): transl_table=11

SEQ ID NO: 69106 - protein, 280 aa, Lactobacillus rhamnosus; identical to SEQ ID NO: 49835

SEQ ID NO: 69107 - DNA, 843 bp, Lactobacillus rhamnosus; identical to SEQ ID NO: 49836
  CDS (1)..(843): transl_table=11

SEQ ID NO: 69108 - protein, 280 aa, Lactobacillus rhamnosus; identical to SEQ ID NO: 49837

SEQ ID NO: 69109 - DNA, 912 bp, Acetobacter tropicalis; identical to SEQ ID NO: 49838
  CDS (1)..(912): transl_table=11

SEQ ID NO: 69110 - protein, 303 aa, Acetobacter tropicalis; identical to SEQ ID NO: 49839

SEQ ID NO: 69111 - DNA, 900 bp, Escherichia coli; identical to SEQ ID NO: 49840
  CDS (1)..(900): transl_table=11

SEQ ID NO: 69112 - protein, 299 aa, Escherichia coli; identical to SEQ ID NO: 49841

SEQ ID NO: 69113 - DNA, 900 bp, Shigella dysenteriae; identical to SEQ ID NO: 49842
  CDS (1)..(900): transl_table=11

SEQ ID NO: 69114 - protein, 299 aa, Shigella dysenteriae; identical to SEQ ID NO: 49843

SEQ ID NO: 69115 - DNA, 963 bp, Mus musculus; identical to SEQ ID NO: 49844
  CDS (1)..(963)

SEQ ID NO: 69116 - protein, 320 aa, Mus musculus; identical to SEQ ID NO: 49845

SEQ ID NO: 69117 - DNA, 879 bp, Yersinia enterocolitica; identical to SEQ ID NO: 49846
  CDS (1)..(879): transl_table=11

SEQ ID NO: 69118 - protein, 292 aa, Yersinia enterocolitica; identical to SEQ ID NO: 49847

SEQ ID NO: 69119 - DNA, 855 bp, Streptococcus oralis; identical to SEQ ID NO: 49848
  CDS (1)..(855): transl_table=11

SEQ ID NO: 69120 - protein, 284 aa, Streptococcus oralis; identical to SEQ ID NO: 49849

SEQ ID NO: 69121 - DNA, 900 bp, Shigella boydii; identical to SEQ ID NO: 49850
  CDS (1)..(900): transl_table=11

SEQ ID NO: 69122 - protein, 299 aa, Shigella boydii; identical to SEQ ID NO: 49851

SEQ ID NO: 69123 - DNA, 885 bp, Clostridium thermosaccharolyticum; identical to SEQ ID NO: 49852
  CDS (1)..(885): transl_table=11

SEQ ID NO: 69124 - protein, 294 aa, Clostridium thermosaccharolyticum; identical to SEQ ID NO: 49853

SEQ ID NO: 69125 - DNA, 891 bp, Klebsiella terrigena; identical to SEQ ID NO: 49854
  CDS (1)..(891): transl_table=11

SEQ ID NO: 69126 - protein, 296 aa, Klebsiella terrigena; identical to SEQ ID NO: 49855

SEQ ID NO: 69127 - DNA, 861 bp, Bacillus stearothermophilus; identical to SEQ ID NO: 49856
  CDS (1)..(861): transl_table=11

SEQ ID NO: 69128 - protein, 286 aa, Bacillus stearothermophilus; identical to SEQ ID NO: 49857

SEQ ID NO: 69129 - DNA, 846 bp, Bacillus stearothermophilus; identical to SEQ ID NO: 49858
  CDS (1)..(846): transl_table=11

SEQ ID NO: 69130 - protein, 281 aa, Bacillus stearothermophilus; identical to SEQ ID NO: 49859

SEQ ID NO: 69131 - DNA, 849 bp, Bacillus stearothermophilus; identical to SEQ ID NO: 49860
  CDS (1)..(849): transl_table=11

SEQ ID NO: 69132 - protein, 282 aa, Bacillus stearothermophilus; identical to SEQ ID NO: 49861

SEQ ID NO: 69133 - DNA, 864 bp, Bacteroides coprosuis; identical to SEQ ID NO: 49862
  CDS (1)..(864): transl_table=11

SEQ ID NO: 69134 - protein, 287 aa, Bacteroides coprosuis; identical to SEQ ID NO: 49863

SEQ ID NO: 69135 - DNA, 852 bp, Thermotoga sp; identical to SEQ ID NO: 49864
  CDS (1)..(852): transl_table=11

SEQ ID NO: 69136 - protein, 283 aa, Thermotoga sp; identical to SEQ ID NO: 49865

SEQ ID NO: 69137 - DNA, 867 bp, Sphingomonas elodea; identical to SEQ ID NO: 49866
  CDS (1)..(867): transl_table=11

SEQ ID NO: 69138 - protein, 288 aa, Sphingomonas elodea; identical to SEQ ID NO: 49867

SEQ ID NO: 69139 - DNA, 852 bp, Streptococcus gordonii; identical to SEQ ID NO: 49868
  CDS (1)..(852): transl_table=11

SEQ ID NO: 69140 - protein, 283 aa, Streptococcus gordonii; identical to SEQ ID NO: 49869
  misc_feature (200)..(200): Xaa can be any naturally occuring amino acid

SEQ ID NO: 69141 - DNA, 888 bp, Vibrio cholerae; identical to SEQ ID NO: 49870
  CDS (1)..(888): transl_table=11

SEQ ID NO: 69142 - protein, 295 aa, Vibrio cholerae; identical to SEQ ID NO: 49871

SEQ ID NO: 69143 - DNA, 855 bp, Vibrio cholerae; identical to SEQ ID NO: 49872
  CDS (1)..(855): transl_table=11

SEQ ID NO: 69144 - protein, 284 aa, Vibrio cholerae; identical to SEQ ID NO: 49873

SEQ ID NO: 69145 - DNA, 891 bp, Vibrio cholerae; identical to SEQ ID NO: 49874
  CDS (1)..(891): transl_table=11

SEQ ID NO: 69146 - protein, 296 aa, Vibrio cholerae; identical to SEQ ID NO: 49875

SEQ ID NO: 69147 - DNA, 891 bp, Vibrio cholerae; identical to SEQ ID NO: 49876
  CDS (1)..(891): transl_table=11

SEQ ID NO: 69148 - protein, 296 aa, Vibrio cholerae; identical to SEQ ID NO: 49877

SEQ ID NO: 69149 - DNA, 891 bp, Vibrio cholerae; identical to SEQ ID NO: 49878
  CDS (1)..(891): transl_table=11

SEQ ID NO: 69150 - protein, 296 aa, Vibrio cholerae; identical to SEQ ID NO: 49879

SEQ ID NO: 69151 - DNA, 891 bp, Vibrio cholerae; identical to SEQ ID NO: 49880
  CDS (1)..(891): transl_table=11

SEQ ID NO: 69152 - protein, 296 aa, Vibrio cholerae; identical to SEQ ID NO: 49881

SEQ ID NO: 69153 - DNA, 873 bp, Vibrio vulnificus; identical to SEQ ID NO: 49882
  CDS (1)..(873): transl_table=11

SEQ ID NO: 69154 - protein, 290 aa, Vibrio vulnificus; identical to SEQ ID NO: 49883

SEQ ID NO: 69155 - DNA, 900 bp, Lactococcus lactis subsp; identical to SEQ ID NO: 49884
  CDS (1)..(900): transl_table=11

SEQ ID NO: 69156 - protein, 299 aa, Lactococcus lactis subsp; identical to SEQ ID NO: 49885

SEQ ID NO: 69157 - DNA, 867 bp, Streptomyces roseochromogenes subsp; identical to SEQ ID NO: 49886
  CDS (1)..(867): transl_table=11

SEQ ID NO: 69158 - protein, 288 aa, Streptomyces roseochromogenes subsp; identical to SEQ ID NO: 49887

SEQ ID NO: 69159 - DNA, 837 bp, Streptococcus suis; identical to SEQ ID NO: 49888
  CDS (1)..(837): transl_table=11

SEQ ID NO: 69160 - protein, 278 aa, Streptococcus suis; identical to SEQ ID NO: 49889

SEQ ID NO: 69161 - DNA, 903 bp, Aeromonas hydrophila; identical to SEQ ID NO: 49890
  CDS (1)..(903): transl_table=11

SEQ ID NO: 69162 - protein, 300 aa, Aeromonas hydrophila; identical to SEQ ID NO: 49891

SEQ ID NO: 69163 - DNA, 903 bp, Aeromonas hydrophila; identical to SEQ ID NO: 49892
  CDS (1)..(903): transl_table=11

SEQ ID NO: 69164 - protein, 300 aa, Aeromonas hydrophila; identical to SEQ ID NO: 49893

SEQ ID NO: 69165 - DNA, 1002 bp, Lactobacillus gasseri; identical to SEQ ID NO: 49894
  CDS (1)..(1002): transl_table=11

SEQ ID NO: 69166 - protein, 333 aa, Lactobacillus gasseri; identical to SEQ ID NO: 49895

SEQ ID NO: 69167 - DNA, 921 bp, Leptospira interrogans; identical to SEQ ID NO: 49896
  CDS (1)..(921): transl_table=11

SEQ ID NO: 69168 - protein, 306 aa, Leptospira interrogans; identical to SEQ ID NO: 49897

SEQ ID NO: 69169 - DNA, 900 bp, Shigella boydii; identical to SEQ ID NO: 49898
  CDS (1)..(900): transl_table=11

SEQ ID NO: 69170 - protein, 299 aa, Shigella boydii; identical to SEQ ID NO: 49899

SEQ ID NO: 69171 - DNA, 900 bp, Shigella boydii; identical to SEQ ID NO: 49900
  CDS (1)..(900): transl_table=11

SEQ ID NO: 69172 - protein, 299 aa, Shigella boydii; identical to SEQ ID NO: 49901

SEQ ID NO: 69173 - DNA, 918 bp, Saccharopolyspora spinosa; identical to SEQ ID NO: 49902
  CDS (1)..(918): transl_table=11

SEQ ID NO: 69174 - protein, 305 aa, Saccharopolyspora spinosa; identical to SEQ ID NO: 49903

SEQ ID NO: 69175 - DNA, 849 bp, Aneurinibacillus thermoaerophilus; identical to SEQ ID NO: 49904
  CDS (1)..(849): transl_table=11

SEQ ID NO: 69176 - protein, 282 aa, Aneurinibacillus thermoaerophilus; identical to SEQ ID NO: 49905

SEQ ID NO: 69177 - DNA, 894 bp, Acinetobacter calcoaceticus; identical to SEQ ID NO: 49906
  CDS (1)..(894): transl_table=11

SEQ ID NO: 69178 - protein, 297 aa, Acinetobacter calcoaceticus; identical to SEQ ID NO: 49907

SEQ ID NO: 69179 - DNA, 897 bp, Burkholderia mallei; identical to SEQ ID NO: 49908
  CDS (1)..(897): transl_table=11

SEQ ID NO: 69180 - protein, 298 aa, Burkholderia mallei; identical to SEQ ID NO: 49909

SEQ ID NO: 69181 - DNA, 930 bp, Azospirillum brasilense; identical to SEQ ID NO: 49910
  CDS (1)..(930): transl_table=11

SEQ ID NO: 69182 - protein, 309 aa, Azospirillum brasilense; identical to SEQ ID NO: 49911

SEQ ID NO: 69183 - DNA, 879 bp, Actinobacillus actinomycetemcomitans; identical to SEQ ID NO: 49912
  CDS (1)..(879): transl_table=11

SEQ ID NO: 69184 - protein, 292 aa, Actinobacillus actinomycetemcomitans; identical to SEQ ID NO: 49913

SEQ ID NO: 69185 - DNA, 888 bp, Acetobacter xylinus; identical to SEQ ID NO: 49914
  CDS (1)..(888): transl_table=11

SEQ ID NO: 69186 - protein, 295 aa, Acetobacter xylinus; identical to SEQ ID NO: 49915

SEQ ID NO: 69187 - DNA, 900 bp, Salmonella enterica; identical to SEQ ID NO: 49916
  CDS (1)..(900): transl_table=11

SEQ ID NO: 69188 - protein, 299 aa, Salmonella enterica; identical to SEQ ID NO: 49917

SEQ ID NO: 69189 - DNA, 900 bp, Salmonella enterica; identical to SEQ ID NO: 49918
  CDS (1)..(900): transl_table=11

SEQ ID NO: 69190 - protein, 299 aa, Salmonella enterica; identical to SEQ ID NO: 49919

SEQ ID NO: 69191 - DNA, 867 bp, Streptomyces rishiriensis; identical to SEQ ID NO: 49920
  CDS (1)..(867): transl_table=11

SEQ ID NO: 69192 - protein, 288 aa, Streptomyces rishiriensis; identical to SEQ ID NO: 49921

SEQ ID NO: 69193 - DNA, 879 bp, Actinobacillus actinomycetemcomitans; identical to SEQ ID NO: 49922
  CDS (1)..(879): transl_table=11

SEQ ID NO: 69194 - protein, 292 aa, Actinobacillus actinomycetemcomitans; identical to SEQ ID NO: 49923

SEQ ID NO: 69195 - DNA, 885 bp, Streptomyces antibioticus; identical to SEQ ID NO: 49924
  CDS (1)..(885): transl_table=11

SEQ ID NO: 69196 - protein, 294 aa, Streptomyces antibioticus; identical to SEQ ID NO: 49925

SEQ ID NO: 69197 - DNA, 876 bp, Streptomyces nogalater; identical to SEQ ID NO: 49926
  CDS (1)..(876): transl_table=11

SEQ ID NO: 69198 - protein, 291 aa, Streptomyces nogalater; identical to SEQ ID NO: 49927

SEQ ID NO: 69199 - DNA, 921 bp, Leptospira interrogans; identical to SEQ ID NO: 49928
  CDS (1)..(921): transl_table=11

SEQ ID NO: 69200 - protein, 306 aa, Leptospira interrogans; identical to SEQ ID NO: 49929

SEQ ID NO: 69201 - DNA, 879 bp, Actinobacillus actinomycetemcomitans; identical to SEQ ID NO: 49930
  CDS (1)..(879): transl_table=11

SEQ ID NO: 69202 - protein, 292 aa, Actinobacillus actinomycetemcomitans; identical to SEQ ID NO: 49931

SEQ ID NO: 69203 - DNA, 855 bp, Streptococcus pneumoniae; identical to SEQ ID NO: 49932
  CDS (1)..(855): transl_table=11

SEQ ID NO: 69204 - protein, 284 aa, Streptococcus pneumoniae; identical to SEQ ID NO: 49933

SEQ ID NO: 69205 - DNA, 891 bp, Klebsiella pneumoniae; identical to SEQ ID NO: 49934
  CDS (1)..(891): transl_table=11

SEQ ID NO: 69206 - protein, 296 aa, Klebsiella pneumoniae; identical to SEQ ID NO: 49935

SEQ ID NO: 69207 - DNA, 921 bp, Leptospira borgpetersenii; identical to SEQ ID NO: 49936
  CDS (1)..(921): transl_table=11

SEQ ID NO: 69208 - protein, 306 aa, Leptospira borgpetersenii; identical to SEQ ID NO: 49937

SEQ ID NO: 69209 - DNA, 906 bp, Escherichia coli; identical to SEQ ID NO: 49938
  CDS (1)..(906): transl_table=11

SEQ ID NO: 69210 - protein, 301 aa, Escherichia coli; identical to SEQ ID NO: 49939

SEQ ID NO: 69211 - DNA, 891 bp, Rhizobium sp; identical to SEQ ID NO: 49940
  CDS (1)..(891): transl_table=11

SEQ ID NO: 69212 - protein, 296 aa, Rhizobium sp; identical to SEQ ID NO: 49941

SEQ ID NO: 69213 - DNA, 900 bp, Salmonella typhimurium; identical to SEQ ID NO: 49942
  CDS (1)..(900): transl_table=11

SEQ ID NO: 69214 - protein, 299 aa, Salmonella typhimurium; identical to SEQ ID NO: 49943

SEQ ID NO: 69215 - DNA, 915 bp, Streptomyces griseus; identical to SEQ ID NO: 49944
  CDS (1)..(915): transl_table=11

SEQ ID NO: 69216 - protein, 304 aa, Streptomyces griseus; identical to SEQ ID NO: 49945

SEQ ID NO: 69217 - DNA, 26 bp, Artificial sequence
  Primer sequence
atgaatatcctcctttttggcaaaac

SEQ ID NO: 69218 - DNA, 27 bp, Artificial sequence
  Primer sequence
ttaaattgctgtagtcgtaaataattc

SEQ ID NO: 69219 - protein, 351 aa, Artificial sequence; identical to SEQ ID NO: 49948
  Consensus
  Variant (2)..(3): Xaa in position 2 to 3 is any amino acid
  Variant (6)..(6): Xaa in position 6 is any amino acid
  Variant (8)..(9): Xaa in position 8 to 9 is any amino acid
  Variant (11)..(19): Xaa in position 11 to 19 is any amino acid
  Variant (20)..(63): Xaa in position 20 to 63 is any or no amino acid
  Variant (65)..(69): Xaa in position 65 to 69 is any amino acid
  Variant (70)..(70): Xaa in position 70 is any or no amino acid
  Variant (73)..(73): Xaa in position 73 is any amino acid
  Variant (75)..(75): Xaa in position 75 is any amino acid
  Variant (78)..(78): Xaa in position 78 is any amino acid
  Variant (81)..(89): Xaa in position 81 to 89 is any amino acid
  Variant (90)..(91): Xaa in position 90 to 91 is any or no amino acid
  Variant (93)..(99): Xaa in position 93 to 99 is any amino acid
  Variant (101)..(113): Xaa in position 101 to 113 is any amino acid
  Variant (120)..(120): Xaa in position 120 is any amino acid
  Variant (122)..(133): Xaa in position 122 to 133 is any amino acid
  Variant (134)..(141): Xaa in position 134 to 141 is any or no amino acid
  Variant (143)..(145): Xaa in position 143 to 145 is any amino acid
  Variant (148)..(149): Xaa in position 148 to 149 is any amino acid
  Variant (151)..(152): Xaa in position 151 to 152 is any amino acid
  Variant (155)..(165): Xaa in position 155 to 165 is any amino acid
  Variant (166)..(173): Xaa in position 166 to 173 is any or no amino acid
  Variant (176)..(176): Xaa in position 176 is any amino acid
  Variant (178)..(182): Xaa in position 178 to 182 is any amino acid
  Variant (184)..(184): Xaa in position 184 is any amino acid
  Variant (185)..(189): Xaa in position 185 to 189 is any or no amino acid
  Variant (192)..(193): Xaa in position 192 to 193 is any amino acid
  Variant (195)..(205): Xaa in position 195 to 205 is any amino acid
  Variant (206)..(213): Xaa in position 206 to 213 is any or no amino acid
  Variant (215)..(216): Xaa in position 215 to 216 is any amino acid
  Variant (219)..(219): Xaa in position 219 is any amino acid
  Variant (221)..(221): Xaa in position 221 is any amino acid
  Variant (224)..(228): Xaa in position 224 to 228 is any amino acid
  Variant (230)..(239): Xaa in position 230 to 239 is any amino acid
  Variant (240)..(257): Xaa in position 240 to 257 is any or no amino acid
  Variant (259)..(260): Xaa in position 259 to 260 is any amino acid
  Variant (262)..(268): Xaa in position 262 to 268 is any amino acid
  Variant (269)..(273): Xaa in position 269 to 273 is any or no amino acid
  Variant (275)..(277): Xaa in position 275 to 277 is any amino acid
  Variant (279)..(296): Xaa in position 279 to 296 is any amino acid
  Variant (297)..(316): Xaa in position 297 to 316 is any or no amino acid
  Variant (318)..(318): Xaa in position 318 is any amino acid
  Variant (321)..(322): Xaa in position 321 to 322 is any amino acid
  Variant (324)..(324): Xaa in position 324 is any amino acid
  Variant (326)..(335): Xaa in position 326 to 335 is any amino acid
  Variant (336)..(350): Xaa in position 336 to 350 is any or no amino acid

SEQ ID NO: 69220 - protein, 10 aa, Artificial sequence
  Consensus
  Variant (2)..(3): Xaa in position 2 to 3 is any or no amino acid
  Variant (6)..(6): Xaa in position 6 is Leu or Val
  Variant (7)..(7): Xaa in position 7 is Ala, Gly, Ser or Val
  Variant (8)..(9): Xaa in position 8 to 9 is any amino acid
  Variant (10)..(10): Xaa in position 10 is Phe, Ile, Leu, Met or Val
GXXGQXXXXX

SEQ ID NO: 69221 - protein, 11 aa, Artificial sequence
  Consensus
  Variant (2)..(2): Xaa in position 2 is any or no amino acid
  Variant (4)..(4): Xaa in position 4 is His, Trp or Tyr
  Variant (6)..(6): Xaa in position 6 is any amino acid
  Variant (9)..(9): Xaa in position 9 is any amino acid
  Variant (10)..(10): Xaa in position 10 is Ala, Cys or Ser
AXAXTXVDXXE

SEQ ID NO: 69222 - protein, 8 aa, Artificial sequence
  Consensus
  Variant (7)..(7): Xaa in position 7 is any amino acid
STDYVFXG

SEQ ID NO: 69223 - protein, 13 aa, Artificial sequence
  Consensus
  Variant (2)..(2): Xaa in position 2 is any amino acid
  Variant (3)..(3): Xaa in position 3 is Gly, Asn, Ser or Thr
  Variant (4)..(4): Xaa in position 4 is any amino acid
  Variant (7)..(7): Xaa in position 7 is any amino acid
  Variant (8)..(8): Xaa in position 8 is Ser or Thr
  Variant (10)..(11): Xaa in position 10 to 11 is any amino acid
PXXXYGXXKXXGE

SEQ ID NO: 69224 - protein, 10 aa, Artificial sequence
  Consensus
  Variant (2)..(2): Xaa in position 2 is any amino acid
  Variant (3)..(3): Xaa in position 3 is Ala, Cys, Gly or Ser
  Variant (5)..(5): Xaa in position 5 is Leu or Val
  Variant (6)..(6): Xaa in position 6 is any amino acid
  Variant (7)..(7): Xaa in position 7 is Ala, Cys, Gly or Ser
  Variant (8)..(9): Xaa in position 8 to 9 is any amino acid
RXXWXXXXXG

SEQ ID NO: 69225 - protein, 17 aa, Artificial sequence
  Consensus
  Variant (2)..(2): Xaa in position 2 is any amino acid
  Variant (3)..(3): Xaa in position 3 is any or no amino acid
  Variant (5)..(5): Xaa in position 5 is any or no amino acid
  Variant (7)..(7): Xaa in position 7 is any amino acid
  Variant (9)..(9): Xaa in position 9 is any amino acid
  Variant (11)..(11): Xaa in position 11 is Ser or Thr
  Variant (12)..(12): Xaa in position 12 is any amino acid
  Variant (13)..(13): Xaa in position 13 is Ala, Ser, Thr or Val
  Variant (14)..(15): Xaa in position 14 to 15 is any amino acid
  Variant (16)..(16): Xaa in position 16 is Ile or Leu
  Variant (17)..(17): Xaa in position 17 is Ala, Asn or Val
VXXDXQXGXPXXXXXXX

SEQ ID NO: 69226 - protein, 9 aa, Artificial sequence
  Consensus
  Variant (2)..(2): Xaa in position 2 is any amino acid
  Variant (5)..(6): Xaa in position 5 to 6 is any amino acid
  Variant (8)..(8): Xaa in position 8 is any amino acid
  Variant (9)..(9): Xaa in position 9 is Leu or Met
AXRPXXSXX

SEQ ID NO: 69227 - DNA, 195 bp, Escherichia coli
  CDS (1)..(195)
atgtacgtttgtctttgtaatggtatcagcgataaaaaaattcgtcaggctgtgcgccagttttcccctcactcgttccagcaattaaaaaaatttattccggtcggcaatcagtgcggtaaatgtgtccgggccgcgcgtgaagtgatggaggatgaattaatgcagctgccggagtttaaggagtccgcataa

SEQ ID NO: 69228 - protein, 64 aa, Escherichia coli
MYVCLCNGISDKKIRQAVRQFSPHSFQQLKKFIPVGNQCGKCVRAAREVMEDELMQLPEFKESA

SEQ ID NO: 69229 - DNA, 189 bp, Vibrio cholerae O1 biovar eltor str. N16961
  CDS (1)..(189): transl_table=11
atgtacgtttgtttgtgtcatggtgtctcagacaaaaagattaggagattggttgccgaacagggtattacggatatcaagggcatcaagcgctgtacagcactgggttctcagtgtggtaagtgtgtacgccaagctaaagagatcatcgaagaatcgctgattgctcagtttaaactggcaagttaa

SEQ ID NO: 69230 - protein, 62 aa, Vibrio cholerae O1 biovar eltor str. N16961
MYVCLCHGVSDKKIRRLVAEQGITDIKGIKRCTALGSQCGKCVRQAKEIIEESLIAQFKLAS

SEQ ID NO: 69231 - DNA, 222 bp, Pseudomonas aeruginosa PAO1
  CDS (1)..(222): transl_table=11
atgtacgtctgcctctgccaaggtgttaccgacaaccagatccgcgatgccatctacgaaggctgctgcagctatcgtgaggttcgcgaagccaccggcgtcggtacccagtgcggcaagtgcgcatgcctggccaagcaggtggtacgcgaaaccctcaacgacctgcagagtgcccagccggtaccggcgttcgggactacggcgttcgtcgctgcctga

SEQ ID NO: 69232 - protein, 73 aa, Pseudomonas aeruginosa PAO1
MYVCLCQGVTDNQIRDAIYEGCCSYREVREATGVGTQCGKCACLAKQVVRETLNDLQSAQPVPAFGTTAFVAA

SEQ ID NO: 69233 - DNA, 195 bp, Yersinia pestis CO92
  CDS (1)..(195): transl_table=11
atgtacgtttgtctatgtaatgcggtttctgacaaagtcattcgcaaagctgtgcgccagcatcagccccatacagttaagcaactgcgacagcttgtgccgattggtagtgactgtgggaagtgcatccgacaagccagagagatcttgattgaggaactcgctaatattccagaaatgaatgatgttgcctaa

SEQ ID NO: 69234 - protein, 64 aa, Yersinia pestis CO92
MYVCLCNAVSDKVIRKAVRQHQPHTVKQLRQLVPIGSDCGKCIRQAREILIEELANIPEMNDVA

SEQ ID NO: 69235 - DNA, 177 bp, Synechocystis sp. PCC 6803
  CDS (1)..(177): transl_table=11
atgtatatctgcgtttgccggggtattagcgataagcaaattgaagcggctgcccagcagggcataacctccctagaagagttgtccgagtccatgggagtaggggctgactgcggtgtctgccaaggccatgcttgccaggtgctagaggcgatcgccagaaggaaattaacctag

SEQ ID NO: 69236 - protein, 58 aa, Synechocystis sp. PCC 6803
MYICVCRGISDKQIEAAAQQGITSLEELSESMGVGADCGVCQGHACQVLEAIARRKLT

SEQ ID NO: 69237 - DNA, 192 bp, Shewanella oneidensis MR-1
  CDS (1)..(192): transl_table=11
atgtatgtttgcctttgtcacgccatcacagatacgcaaatcaaaaacgcggtaagccaaggcgacacgagtcttgctgacgttaaaaagcgtttaggcgttgccgatcaatgcggtaaatgcgcgagaatggctgtacaaatcatccagaatcaactggaaattgaacctaaatactacgaagtcgcttaa

SEQ ID NO: 69238 - protein, 63 aa, Shewanella oneidensis MR-1
MYVCLCHAITDTQIKNAVSQGDTSLADVKKRLGVADQCGKCARMAVQIIQNQLEIEPKYYEVA

SEQ ID NO: 69239 - DNA, 219 bp, Pseudomonas putida KT2440
  CDS (1)..(219): transl_table=11
atgtatgtgtgtctttgtgtcggcgttaccgacggacagatccgcgatgcgatctatgaaggatgctgcagttacaaggaagtgcgagccgccaccaatgtcgccagccagtgtgggaaatgcgcctgcgtggccaagcaggtggtccgcgagaccctgaccgagcttcaggtcagccaggcggccttgccctaccccgtcgaatttaccgctgcctga

SEQ ID NO: 69240 - protein, 72 aa, Pseudomonas putida KT2440
MYVCLCVGVTDGQIRDAIYEGCCSYKEVRAATNVASQCGKCACVAKQVVRETLTELQVSQAALPYPVEFTAA

SEQ ID NO: 69241 - DNA, 189 bp, Vibrio vulnificus CMCP6
  CDS (1)..(189): transl_table=11
atgtacgtttgtttgtgtcatggtgtttcagacaagaaaattcgcaagcttgttattgagcaaggtgttgcggatattcgcggaatcaaaaagtgcactgcattgggaagtcaatgtggcaaatgcatacgtatggcgaaagagattatcaacgagactgctccggcactattcaagcaagccagttaa

SEQ ID NO: 69242 - protein, 62 aa, Vibrio vulnificus CMCP6
MYVCLCHGVSDKKIRKLVIEQGVADIRGIKKCTALGSQCGKCIRMAKEIINETAPALFKQAS

SEQ ID NO: 69243 - DNA, 219 bp, Pseudomonas syringae pv. tomato str. DC3000
  CDS (1)..(219): transl_table=11
atgtatgtttgtctttgccaaggtgtaacagacggtcaaatccgggaagcgattctcgagggctgctgcagttatcgtgaggtccgcgaaacgctgggcgttgcgagtaaatgtggaaagtgcgcctgtctggccaaggaagtggtacgcgacacgctgaccgaactgcaaagcagtcatgcggcgctggcttattcaacagaattttcagccgcttaa

SEQ ID NO: 69244 - protein, 72 aa, Pseudomonas syringae pv. tomato str. DC3000
MYVCLCQGVTDGQIREAILEGCCSYREVRETLGVASKCGKCACLAKEVVRDTLTELQSSHAALAYSTEFSAA

SEQ ID NO: 69245 - DNA, 189 bp, Vibrio parahaemolyticus RIMD 2210633
  CDS (1)..(189): transl_table=11
atgtacgtttgtctttgccatggcgtctccgacaaaaaaattaggaagttggcgatagatgaaggtgtcactgatattcgaggtattaagagatgcactgctttggggagtcagtgtggtaagtgcattaagcaggcaaaagaaatcctagcagaaacacattacacagaattaagacaagccagttaa

SEQ ID NO: 69246 - protein, 62 aa, Vibrio parahaemolyticus RIMD 2210633
MYVCLCHGVSDKKIRKLAIDEGVTDIRGIKRCTALGSQCGKCIKQAKEILAETHYTELRQAS

SEQ ID NO: 69247 - DNA, 195 bp, Photorhabdus luminescens subsp. laumondii TTO1
  CDS (1)..(195): transl_table=11
atgtatgtctgcctatgtaatgcggtgagtgacaaaacaatacgtaatgcggtgcgtcaacatcatattcactctattaaagaactaaaatgtattgtgcctgtaggccgtgattgtggcaaatgcatacgccaagctagagagctaattaatgaggagattgcacagttacccaagatagataacgttgcttga

SEQ ID NO: 69248 - protein, 64 aa, Photorhabdus luminescens subsp. laumondii TTO1
MYVCLCNAVSDKTIRNAVRQHHIHSIKELKCIVPVGRDCGKCIRQARELINEEIAQLPKIDNVA

SEQ ID NO: 69249 - DNA, 201 bp, Vibrio vulnificus YJ016
  CDS (1)..(201): transl_table=11
ttgagttgtaatatgtacgtttgtttgtgtcatggtgtttcagacaagaaaattcgcaagcttgttattgagcaaggtgttgcggatattcgcggaatcaaaaagtgcactgcattgggaagtcaatgtggcaaatgtatacgtatggcgaaagagattatcaacgagactgctccggcactattcaagcaagccagttaa

SEQ ID NO: 69250 - protein, 66 aa, Vibrio vulnificus YJ016
MSCNMYVCLCHGVSDKKIRKLVIEQGVADIRGIKKCTALGSQCGKCIRMAKEIINETAPALFKQAS

SEQ ID NO: 69251 - DNA, 195 bp, Escherichia coli O157:H7
  CDS (1)..(195): transl_table=11
atgtacgtttgtttgtgtaatggtgtaagtgacaaaaaaattcgccaggcagtccgtcagtttcatccgcaatctttccaacaattgcgtaagtttattcctgtgggaaatcaatgtggtaagtgcattcgcgccgcgcgcgaagtgatgcaggacgagttgatgcagatgccagaatttaaagagattgcctga

SEQ ID NO: 69252 - protein, 64 aa, Escherichia coli O157:H7
MYVCLCNGVSDKKIRQAVRQFHPQSFQQLRKFIPVGNQCGKCIRAAREVMQDELMQMPEFKEIA

SEQ ID NO: 69253 - DNA, 210 bp, Acinetobacter sp. ADP1
  CDS (1)..(210): transl_table=11
atgcgaatgactctgatgtacgtttgtttgtgtcgtggtattacagatcaagatattaaagatgccgttgcaagcggtgctgaaagttaccgcgaagttcgtgagcgcttagatcttggtacgtgctgtggacgctgtgcaccagaagccaaaagtatcattaatgaagaacttgcagaaattgcagctcgcatctctgttgctgcatag

SEQ ID NO: 69254 - protein, 69 aa, Acinetobacter sp. ADP1
MRMTLMYVCLCRGITDQDIKDAVASGAESYREVRERLDLGTCCGRCAPEAKSIINEELAEIAARISVAA

SEQ ID NO: 69255 - DNA, 195 bp, Erwinia carotovora subsp. atroseptica SCRI1043
  CDS (1)..(195): transl_table=11
atgtatgtttgtttatgcaacgcaatttctgacaaagccattcgtaatgctgttcgtcagcaccagcctcaatctatgcaacaattacgcaaactcgttcctatcgggacagattgcggtaagtgcattcgtcaggcgcgtgttatttttgaggaagagcaggctaaaattcctgacatgtataaagtagcataa

SEQ ID NO: 69256 - protein, 64 aa, Erwinia carotovora subsp. atroseptica SCRI1043
MYVCLCNAISDKAIRNAVRQHQPQSMQQLRKLVPIGTDCGKCIRQARVIFEEEQAKIPDMYKVA

SEQ ID NO: 69257 - DNA, 207 bp, Yersinia pseudotuberculosis IP 32953
  CDS (1)..(207): transl_table=11
atgagtctttttatgtacgtttgtctatgtaatgcggtttctgacaaagtcattcgcaaagctgtgcgccagcatcagccccatacagttaagcaactgcgacagcttgtgccgattggtagtgactgtgggaagtgcatccgacaagccagagagatcttgattgaggaactcgctaatattccagaaatgaatgatgttgcctaa

SEQ ID NO: 69258 - protein, 68 aa, Yersinia pseudotuberculosis IP 32953
MSLFMYVCLCNAVSDKVIRKAVRQHQPHTVKQLRQLVPIGSDCGKCIRQAREILIEELANIPEMNDVA

SEQ ID NO: 69259 - DNA, 240 bp, Burkholderia pseudomallei K96243
  CDS (1)..(240): transl_table=11
atgatcgtctgcgtgtgcaagtccgtttccgatcggaagattcgcgcatccctcgcggaaggcgtgaacacgttcgaagaactccagttcgaactcggggtcgccacctgctgcggcaagtgcgaggaaaccgtgcgcgagatcatggcggaacagggcgtttgtgcgagccgttgcggtgccgagcgccctgcggccgtaccggtcgccgtcacgttctacgaacgcaaggcggcctga

SEQ ID NO: 69260 - protein, 79 aa, Burkholderia pseudomallei K96243
MIVCVCKSVSDRKIRASLAEGVNTFEELQFELGVATCCGKCEETVREIMAEQGVCASRCGAERPAAVPVAVTFYERKAA

SEQ ID NO: 69261 - DNA, 204 bp, Methylococcus capsulatus str. Bath
  CDS (1)..(204): transl_table=11
atgtatgtctgcatctgtaggagcgtcactgaccgccaggttcgggaagtcgtcactcgccacggcgcgtacaatctgcgcaccttgcggacgcgcctggacgcctgcagccagtgcgggaaatgcgcgctggaagtcaagacgctgatccaggaaaccctggcggagaacgccgtattggaacagcagaacatggccgcctga

SEQ ID NO: 69262 - protein, 67 aa, Methylococcus capsulatus str. Bath
MYVCICRSVTDRQVREVVTRHGAYNLRTLRTRLDACSQCGKCALEVKTLIQETLAENAVLEQQNMAA

SEQ ID NO: 69263 - DNA, 189 bp, Photobacterium profundum SS9
  CDS (1)..(189): transl_table=11
atgtacgtttgtttatgctttggtatttccgataaaaaaatcataagattaacccagcagaacaaagtcagtgatatacgaagcattcgagaaattacatcattaggctctcaatgtggtaaatgtattcgacaagcgaaaaatattatcgaagaaacaatagcgataagctttgaaaaagccagttag

SEQ ID NO: 69264 - protein, 62 aa, Photobacterium profundum SS9
MYVCLCFGISDKKIIRLTQQNKVSDIRSIREITSLGSQCGKCIRQAKNIIEETIAISFEKAS

SEQ ID NO: 69265 - DNA, 225 bp, Idiomarina loihiensis L2TR
  CDS (1)..(225): transl_table=11
atgtatgtttgtctttgtaaaggtattaacgataaagtcatccatcaggccgtagtttctggtgaggtgaactcaatgcgagacttacgccagcaatacggtgtagcctcacagtgcgggtgttgtaaaagctgcgccaaagatgttcttcacgaagccctcgagcaacgttctaatcaagcaggtaaagagactcaacttccggtttccgtatgctacacttaa

SEQ ID NO: 69266 - protein, 74 aa, Idiomarina loihiensis L2TR
MYVCLCKGINDKVIHQAVVSGEVNSMRDLRQQYGVASQCGCCKSCAKDVLHEALEQRSNQAGKETQLPVSVCYT

SEQ ID NO: 69267 - DNA, 231 bp, Azoarcus sp. EbN1
  CDS (1)..(231): transl_table=11
atgtacgtctgcgtctgcaacgcggtaacggatcgccatatcgaacaggcagtcagcgaaggggcatcgaccttgcgcgagctgcgcacgaaactcggcgtggcgagcgagtgcggtcgctgcgcgacatgcgctcgtgattgcctgcgttccgcgctggcagaacagatcgcgactccggcccccgccggcgtcgcgtcctcgttctcgtttgccgcggaggccttatga

SEQ ID NO: 69268 - protein, 76 aa, Azoarcus sp. EbN1
MYVCVCNAVTDRHIEQAVSEGASTLRELRTKLGVASECGRCATCARDCLRSALAEQIATPAPAGVASSFSFAAEAL

SEQ ID NO: 69269 - DNA, 219 bp, Pseudomonas syringae pv. syringae B728a
  CDS (1)..(219): transl_table=11
atgtatgtttgcctctgccaaggtgtcaccgacggtcaaatccgggatgcaattctggaaggctgctgcagttatcgtgaagtccgtgaaacactgggtgttgcgagtaaatgtggaaaatgcgcctgcctggcaaaggaagtggtgcgtgatacgctgaccgagctgcaaaccagccatgccttgctggcctatccggcaaaattttcagctgcctga

SEQ ID NO: 69270 - protein, 72 aa, Pseudomonas syringae pv. syringae B728a
MYVCLCQGVTDGQIRDAILEGCCSYREVRETLGVASKCGKCACLAKEVVRDTLTELQTSHALLAYPAKFSAA

SEQ ID NO: 69271 - DNA, 219 bp, Pseudomonas fluorescens Pf-5
  CDS (1)..(219): transl_table=11
atgtatgtctgcctctgcaccggtgtcaccgacggacaaattcgcgaagcgatctacgaaggttgctgcagctaccgcgaagtacgccaggccaccggcgtcgccagccagtgcggcaaatgtgcctgcctggccaagcaagtggttcgcgaaaccctgaccgaattgcagagcagccaagcggcaatcccctaccctgtggaatttaatgtcgcctga

SEQ ID NO: 69272 - protein, 72 aa, Pseudomonas fluorescens Pf-5
MYVCLCTGVTDGQIREAIYEGCCSYREVRQATGVASQCGKCACLAKQVVRETLTELQSSQAAIPYPVEFNVA

SEQ ID NO: 69273 - DNA, 195 bp, Colwellia psychrerythraea 34H
  CDS (1)..(195): transl_table=11
atgtacgtttgtatttgccatggtgttaccgatacccagatagaatccgctattgataatggcgtagaaactatgaaagggttaacccaagagcttaatgtaggatcgcaatgtggtaaatgttgtcaatgtactaaacgcgtactcaacagaaagttaatacaaattgctgaggcacagccacaggtcgcttaa

SEQ ID NO: 69274 - protein, 64 aa, Colwellia psychrerythraea 34H
MYVCICHGVTDTQIESAIDNGVETMKGLTQELNVGSQCGKCCQCTKRVLNRKLIQIAEAQPQVA

SEQ ID NO: 69275 - DNA, 219 bp, Pseudomonas syringae pv. phaseolicola 1448A
  CDS (1)..(219): transl_table=11
atgtatgtttgtctttgccaaggtgtcacagacggtcaaatccgggatgcaattctggaaggctgctgcagttatcgtgaagtccgtgaaacgctgggtgttgcgagtaaatgcggaaaatgcgcctgccttgcgaaggaagtggtgcgtgacacgctgacagaactgcaaaccactcaggcatcgctggcctatccagcagaattttcagctgcctga

SEQ ID NO: 69276 - protein, 72 aa, Pseudomonas syringae pv. phaseolicola 1448A
MYVCLCQGVTDGQIRDAILEGCCSYREVRETLGVASKCGKCACLAKEVVRDTLTELQTTQASLAYPAEFSAA

SEQ ID NO: 69277 - DNA, 213 bp, Thiobacillus denitrificans ATCC 25259
  CDS (1)..(213): transl_table=11
atgtacgtctgcctgtgccacggcgtcaccgacaccgacattcgccgcctcgtgcgcaccgaaggtgtgtgcacgatgcgtgaactgagccaggaactcggcgttgcgacccagtgcggcaagtgcggtcgctgcgccaaggaagtgctgtgccaggccgtggccgacgtccgccaggaaaacgcctgctgcggcgccttgatggcggcctga

SEQ ID NO: 69278 - protein, 70 aa, Thiobacillus denitrificans ATCC 25259
MYVCLCHGVTDTDIRRLVRTEGVCTMRELSQELGVATQCGKCGRCAKEVLCQAVADVRQENACCGALMAA

SEQ ID NO: 69279 - DNA, 240 bp, Burkholderia pseudomallei 1710b
  CDS (1)..(240): transl_table=11
atgatcgtctgcgtgtgcaagtccgtttccgatcggaagattcgcgcatccctcgcggaaggcgtgaacacgttcgaagaactccagttcgaactcggggtcgccacctgctgcggcaagtgcgaggaaaccgtgcgcgagatcatggcggaacagggcgtttgtgcgagccgttgcggtgtcgagcgccccgcggccgtaccggtcgccgtcacgttctacgaacgcaaggcggcctga

SEQ ID NO: 69280 - protein, 79 aa, Burkholderia pseudomallei 1710b
MIVCVCKSVSDRKIRASLAEGVNTFEELQFELGVATCCGKCEETVREIMAEQGVCASRCGVERPAAVPVAVTFYERKAA

SEQ ID NO: 69281 - DNA, 195 bp, Pseudoalteromonas haloplanktis TAC125
  CDS (1)..(195): transl_table=11
atgtatatttgtctatgtcacggtgtgaccgataaaaaaattgaacaaacaattgacgatggtgcaacaaccatgcgtgagttaactaaagagcttaaagtgggcagccaatgcggtaagtgttgtggttgtactaaaaagatccttaatcgtaagcttattcaaattgccgatataacggatcaagtggcttaa

SEQ ID NO: 69282 - protein, 64 aa, Pseudoalteromonas haloplanktis TAC125
MYICLCHGVTDKKIEQTIDDGATTMRELTKELKVGSQCGKCCGCTKKILNRKLIQIADITDQVA

SEQ ID NO: 69283 - DNA, 195 bp, Nitrosococcus oceani ATCC 19707
  CDS (1)..(195): transl_table=11
atgtatgtatgtatatgtcatgccgtaactgataagcagttgcaagaagcgatttcgcaaggtaccaatagcctccgtgatctgagacgtcagctgggggtagtaagtagctgtggtaaatgtggttgttgtgtgcgagatattttacgacagtctcggcaggctagcgctactgaggttagtaatgtggcgtag

SEQ ID NO: 69284 - protein, 64 aa, Nitrosococcus oceani ATCC 19707
MYVCICHAVTDKQLQEAISQGTNSLRDLRRQLGVVSSCGKCGCCVRDILRQSRQASATEVSNVA

SEQ ID NO: 69285 - DNA, 219 bp, Pseudomonas fluorescens PfO-1
  CDS (1)..(219): transl_table=11
atgtatgtttgcctctgcactggcgtcaccgacggacagatccgcgaagcgatctatgaaggttgctgcagctataaagaagtccgtcaggccaccggcgtcgccagccaatgcggcaaatgtgcgtgcctggcgaaggaagtggtccgcgaaaccctgaccaagctgcaaaccgcccaggctgcgatcccctacccggcagaatttaccgccgcgtaa

SEQ ID NO: 69286 - protein, 72 aa, Pseudomonas fluorescens PfO-1
MYVCLCTGVTDGQIREAIYEGCCSYKEVRQATGVASQCGKCACLAKEVVRETLTKLQTAQAAIPYPAEFTAA

SEQ ID NO: 69287 - DNA, 207 bp, Microbulbifer degradans 2-40
  CDS (1)..(207)
atgtatgtttgtctttgcaagggcataaccgattcgcaaatccgcactgcggttaacaatggcgcagaaagcatgcgcgctgtacgcgatcaactaggcgtggcatctcaatgcggcaaatgctcttctttttgcagagaaatcgttcgcgaaaccttagagaacaccgccgatcttggcgcaggaagcttctatcaggtagcttaa

SEQ ID NO: 69288 - protein, 68 aa, Microbulbifer degradans 2-40
MYVCLCKGITDSQIRTAVNNGAESMRAVRDQLGVASQCGKCSSFCREIVRETLENTADLGAGSFYQVA

SEQ ID NO: 69289 - DNA, 408 bp, Chromohalobacter salexigens DSM 3043
  CDS (1)..(408): transl_table=11
gtgttgttgaggcgacaaaagcctcccaatcccttccacccccacccacccggcaattctccgtttagccccacctttcagccacttaccggcacgttagccgaaagtcgagcgcccgccgagcgaaaagatagtgattgggggttgaaagtctttatgcgaatcatttacattcactatcatagcgatcagcgaggtgatggaatgtacgtgtgcatatgccgaggcgtgaccgacaatgccattcgcgaggccgttgaagacggcgcgcgtagctggcgtgaagtgcgcgagcgcaccgagtgtgcgactcagtgtggccgctgcgcctgcacggccaaggccatcacgcgtgatgccatcacccaggaaatgatgccgagcgaggatctcgcctacgccgtctag

SEQ ID NO: 69290 - protein, 135 aa, Chromohalobacter salexigens DSM 3043
MLLRRQKPPNPFHPHPPGNSPFSPTFQPLTGTLAESRAPAERKDSDWGLKVFMRIIYIHYHSDQRGDGMYVCICRGVTDNAIREAVEDGARSWREVRERTECATQCGRCACTAKAITRDAITQEMMPSEDLAYAV

SEQ ID NO: 69291 - DNA, 192 bp, Shewanella baltica OS155
  CDS (1)..(192): transl_table=11
atgtacgtttgtctttgccatgcgatcaccgatacgcaaattaaaaatgccgtaagccagggcgatagctcgcttgctgacgtgaaaaagcgcttaggtgttgccgatcaatgtggcaagtgtgcaagaatggcggtacagatcatccagaatcaattagagcgtgagcctaattattacgaagtcgcgtaa

SEQ ID NO: 69292 - protein, 63 aa, Shewanella baltica OS155
MYVCLCHAITDTQIKNAVSQGDSSLADVKKRLGVADQCGKCARMAVQIIQNQLEREPNYYEVA

SEQ ID NO: 69293 - DNA, 252 bp, Shewanella amazonensis SB2B
  CDS (1)..(252): transl_table=11
atgatgagaacggtttttatttataatccacatcattcaaccgccggagcatttttcaccatgtatgtctgtgtttgttatgccgtgacagatacccaaatccaggaagccgttcatcagggcgatattaccttggccgcggtgaaaaaacgcctgggtgttggcagccagtgtggtaaatgcattcaaacgaccctcgaagtgattcagcgccagctggacgtcgagcccaattactacgaagtcgcctga

SEQ ID NO: 69294 - protein, 83 aa, Shewanella amazonensis SB2B
MMRTVFIYNPHHSTAGAFFTMYVCVCYAVTDTQIQEAVHQGDITLAAVKKRLGVGSQCGKCIQTTLEVIQRQLDVEPNYYEVA

SEQ ID NO: 69295 - DNA, 192 bp, Shewanella denitrificans OS-217
  CDS (1)..(192): transl_table=11
atgttcgtttgcctttgccatgcgataaccgatactcagatcaaacaagccgttggtcagggtgacagttcattggccgatgtaaaaaagcgtctaggtgtagccgatcaatgcggaaagtgcgcccgtatggcgacgcaaatcatccaaaaccaagttgcaatcgagcctaatttctacgaagtcgcttaa

SEQ ID NO: 69296 - protein, 63 aa, Shewanella denitrificans OS-217
MFVCLCHAITDTQIKQAVGQGDSSLADVKKRLGVADQCGKCARMATQIIQNQVAIEPNFYEVA

SEQ ID NO: 69297 - DNA, 192 bp, Shewanella frigidimarina NCIMB 400
  CDS (1)..(192): transl_table=11
atgttcgtttgtctttgtcatgctattaccgacactcaaattaaagctgctgttagcttaggtgacagttcgttagctgatgtaaagaaacgtcttggcgttgcagaccaatgcggcaaatgtgcccgcatggctagtcaaatcattcaaacacagcttgagtacgaacctaatttctatgaagttgcctag

SEQ ID NO: 69298 - protein, 63 aa, Shewanella frigidimarina NCIMB 400
MFVCLCHAITDTQIKAAVSLGDSSLADVKKRLGVADQCGKCARMASQIIQTQLEYEPNFYEVA

SEQ ID NO: 69299 - DNA, 195 bp, Pseudoalteromonas atlantica T6c
  CDS (1)..(195): transl_table=11
atgtacgtttgtttgtgtcacggcattaccgacaaagctattaaacaggccgttcgcgaagacggtgtgggcaatatgcgccagttacgtgaagcgcttggcgtgggtgatcagtgcggcaaatgtgtgcgtatggcgcaaagcatcgttgacaacacgattattgatgaatctctatttaaagaagtgtgttaa

SEQ ID NO: 69300 - protein, 64 aa, Pseudoalteromonas atlantica T6c
MYVCLCHGITDKAIKQAVREDGVGNMRQLREALGVGDQCGKCVRMAQSIVDNTIIDESLFKEVC

SEQ ID NO: 69301 - DNA, 192 bp, Shewanella putrefaciens CN-32
  CDS (1)..(192): transl_table=11
atgtacgtttgtctttgccatgccatcacagatacgcagattaaaaacgcggtaagccagggcgatagttcccttgccgatgtgaaaaagcgtttaggtgttgcagatcaatgtggcaaatgtgcaagaatggccgtacagataatccaaaatcaattggagctagaacctaaatattatgaagtggcgtaa

SEQ ID NO: 69302 - protein, 63 aa, Shewanella putrefaciens CN-32
MYVCLCHAITDTQIKNAVSQGDSSLADVKKRLGVADQCGKCARMAVQIIQNQLELEPKYYEVA

SEQ ID NO: 69303 - DNA, 207 bp, Marinobacter aquaeolei VT8
  CDS (1)..(207): transl_table=11
atgtacgtttgcctgtgttacggggtaacagacagagaaatccgcgaagccgctgaaagcggtgtcagttccatgcgccagctcggcaaggaacttggcgtcggtcgccagtgcggtcgttgcgcctgcactgcccgggaaattctgaaagagtcccggtcaccggattatatggcgctcgccaatatgctggcgcaacccgcctga

SEQ ID NO: 69304 - protein, 68 aa, Marinobacter aquaeolei VT8
MYVCLCYGVTDREIREAAESGVSSMRQLGKELGVGRQCGRCACTAREILKESRSPDYMALANMLAQPA

SEQ ID NO: 69305 - DNA, 195 bp, Yersinia mollaretii ATCC 43969
  CDS (1)..(195)
atgtacgtttgtctgtgtaatgccgtatctgacaaagttatccgtaaagctgttcgtcagcaccatccacatactattcagcagttgcgtcaactagtacccatcggtacagactgcggaaagtgcattcgacaggccagagaaatcttgatcgaggaacgcgctaatattccagaaatgaatgatgttgcttag

SEQ ID NO: 69306 - protein, 64 aa, Yersinia mollaretii ATCC 43969
MYVCLCNAVSDKVIRKAVRQHHPHTIQQLRQLVPIGTDCGKCIRQAREILIEERANIPEMNDVA

SEQ ID NO: 69307 - DNA, 195 bp, Yersinia intermedia ATCC 29909
  CDS (1)..(195)
atgtacgtttgcctgtgtaatgcggtatctgacaaagttatccgtaaagctgtacgtcagcaccatccacataccattaaacaactgcgtcaattggtacccattggtacagactgcggtaagtgcatccgacaggccagagagatactgattgaggagcgcgcgaacattccagaaatgaatgatgttgcctaa

SEQ ID NO: 69308 - protein, 64 aa, Yersinia intermedia ATCC 29909
MYVCLCNAVSDKVIRKAVRQHHPHTIKQLRQLVPIGTDCGKCIRQAREILIEERANIPEMNDVA

SEQ ID NO: 69309 - DNA, 192 bp, Shewanella sp. PV-4
  CDS (1)..(192): transl_table=11
atgtatgtttgcctttgccacgccattaccgacaagcaaataaaagaagctgtcgatcaaggagatatgtctcttgccgacgttaagcgtcgtctgggtgttggcaatcaatgtggtaaatgtagcaagatggccaccgagatcatccaggcccgcctcgatgtaacccccaacttctacgaagtggcttag

SEQ ID NO: 69310 - protein, 63 aa, Shewanella sp. PV-4
MYVCLCHAITDKQIKEAVDQGDMSLADVKRRLGVGNQCGKCSKMATEIIQARLDVTPNFYEVA

SEQ ID NO: 69311 - DNA, 192 bp, Shewanella sp. ANA-3
  CDS (1)..(192): transl_table=11
atgtacgtttgtctctgccatgccatcacagatacgcaaatcaaaaacgcggtaagtcagggcgactctagccttgctgacgttaaaaagcgtttaggcgttgccgatcaatgcggtaagtgcgccagaatggccgtacaaattattcagaaccaattagaaattgaacctaattactacgaagtggcttaa

SEQ ID NO: 69312 - protein, 63 aa, Shewanella sp. ANA-3
MYVCLCHAITDTQIKNAVSQGDSSLADVKKRLGVADQCGKCARMAVQIIQNQLEIEPNYYEVA

SEQ ID NO: 69313 - DNA, 192 bp, Shewanella sp. MR-7
  CDS (1)..(192): transl_table=11
atgtacgtttgtctctgccatgccatcacagataggcaaatcaaaaacgccgtaagtcagggcgatactagccttgctgacgttaaaaagcgtttaggcgttgccgatcaatgcggtaagtgcgcgagaatggccgtacaaatcatccaaaaccaactggaaattgaacctaaatactacgaagtcgcttaa

SEQ ID NO: 69314 - protein, 63 aa, Shewanella sp. MR-7
MYVCLCHAITDRQIKNAVSQGDTSLADVKKRLGVADQCGKCARMAVQIIQNQLEIEPKYYEVA

SEQ ID NO: 69315 - DNA, 222 bp, Azotobacter vinelandii
  CDS (1)..(222): transl_table=11
atgtacgtatgtctttgccaaggtattaccgatggtcaaatccgtagcgcaattcagggcggctgctgcacttatcgtgatgtgcggattgccttgggcgttggcacacagtgcggcaaatgcgcctgcgtcgccaaacagatcgcgcgagaaacccttggcgaaggggcacaaaacacccaggatgcaaccttctgcccggcggcactggctgcctcttga

SEQ ID NO: 69316 - protein, 73 aa, Azotobacter vinelandii
MYVCLCQGITDGQIRSAIQGGCCTYRDVRIALGVGTQCGKCACVAKQIARETLGEGAQNTQDATFCPAALAAS

SEQ ID NO: 69317 - DNA, 195 bp, Salmonella typhi
  CDS (1)..(195): transl_table=11
atgtacgtttgtttgtgtaatggtataagcgataaaaaaatccgccaggctgtacgacaatttcatccacagtcatttcaacagttgcgtaaatttattcctgtgggaaatcaatgtggtaagtgtattcgcgccgcgcgagaagtgatgcaggatgagttaacgcaaatgccggaatttaaagagatcgcctga

SEQ ID NO: 69318 - protein, 64 aa, Salmonella typhi
MYVCLCNGISDKKIRQAVRQFHPQSFQQLRKFIPVGNQCGKCIRAAREVMQDELTQMPEFKEIA

SEQ ID NO: 69319 - DNA, 195 bp, Serratia marcescens
  CDS (1)..(195): transl_table=11
atgtatgtatgtctgtgtaatgcggtgactgacaaagcgatccgtaatgcggtgcgtcagcacaacccccataccatgaagcaactgcgtgaacttgtgccgattggtaccgattgtggaaagtgcattcgtcaggcaagacagattatggtggaggaatgcggaactatcatcccaatgcatgaagttgcctaa

SEQ ID NO: 69320 - protein, 64 aa, Serratia marcescens
MYVCLCNAVTDKAIRNAVRQHNPHTMKQLRELVPIGTDCGKCIRQARQIMVEECGTIIPMHEVA

SEQ ID NO: 69321 - DNA, 26 bp, Artificial sequence
  Primer sequence
atgtacgtttgtctttgtaatggtat

SEQ ID NO: 69322 - DNA, 23 bp, Artificial sequence
  Primer sequence
ttatgcggactccttaaactccg

SEQ ID NO: 69323 - protein, 46 aa, Artificial sequence
  Consensus
  Variant (7)..(10): Xaa in position 7 to 10 is any amino acid
  Variant (12)..(13): Xaa in position 12 to 13 is any amino acid
  Variant (15)..(37): Xaa in position 15 to 37 is any amino acid
  Variant (38)..(38): Xaa in position 38 is any or no amino acid
  Variant (43)..(45): Xaa in position 43 to 45 is any amino acid
MYVCLCXXXXDXXIXXXXXXXXXXXXXXXXXXXXXXXXCGKCXXXA

SEQ ID NO: 69324 - protein, 14 aa, Artificial sequence
  Consensus
  Variant (5)..(5): Xaa in position 5 is Ile, Leu or Val
  Variant (7)..(7): Xaa in position 7 is any amino acid
  Variant (8)..(8): Xaa in position 8 is Ala or Gly
  Variant (9)..(9): Xaa in position 9 is Ile or Val
  Variant (10)..(10): Xaa in position 10 is Ser or Thr
  Variant (12)..(13): Xaa in position 12 to 13 is any amino acid
MYVCXCXXXXDXXI

SEQ ID NO: 69325 - protein, 8 aa, Artificial sequence
  Consensus
  Variant (5)..(7): Xaa in position 5 to 7 is any amino acid
  Variant (8)..(8): Xaa in position 8 is Ala, Thr or Val
CGKCXXXX

SEQ ID NO: 69326 - DNA, 1026 bp, Escherichia coli K12; identical to SEQ ID NO: 32742
  CDS (1)..(1026): transl_table=11

SEQ ID NO: 69327 - protein, 341 aa, Escherichia coli K12; identical to SEQ ID NO: 32743

SEQ ID NO: 69328 - DNA, 1113 bp, Deinococcus radiodurans R1; identical to SEQ ID NO: 32744
  CDS (1)..(1113): transl_table=11

SEQ ID NO: 69329 - protein, 370 aa, Deinococcus radiodurans R1; identical to SEQ ID NO: 32745

SEQ ID NO: 69330 - DNA, 1062 bp, Bacillus subtilis subsp. subtilis str. 168; identical to SEQ ID NO: 32746
  CDS (1)..(1062): transl_table=11

SEQ ID NO: 69331 - protein, 353 aa, Bacillus subtilis subsp. subtilis str. 168; identical to SEQ ID NO: 32747

SEQ ID NO: 69332 - DNA, 1044 bp, Caenorhabditis elegans; identical to SEQ ID NO: 32748
  CDS (1)..(1044)

SEQ ID NO: 69333 - protein, 347 aa, Caenorhabditis elegans; identical to SEQ ID NO: 32749

SEQ ID NO: 69334 - DNA, 1047 bp, Pseudomonas putida; identical to SEQ ID NO: 32750
  CDS (1)..(1047): transl_table=11

SEQ ID NO: 69335 - protein, 348 aa, Pseudomonas putida; identical to SEQ ID NO: 32751

SEQ ID NO: 69336 - DNA, 1053 bp, Thermoanaerobacter tengcongensis MB4; identical to SEQ ID NO: 32752
  CDS (1)..(1053): transl_table=11

SEQ ID NO: 69337 - protein, 350 aa, Thermoanaerobacter tengcongensis MB4; identical to SEQ ID NO: 32753

SEQ ID NO: 69338 - DNA, 1035 bp, Oceanobacillus iheyensis HTE831; identical to SEQ ID NO: 32754
  CDS (1)..(1035): transl_table=11

SEQ ID NO: 69339 - protein, 344 aa, Oceanobacillus iheyensis HTE831; identical to SEQ ID NO: 32755

SEQ ID NO: 69340 - DNA, 1056 bp, Oceanobacillus iheyensis HTE831; identical to SEQ ID NO: 32756
  CDS (1)..(1056): transl_table=11

SEQ ID NO: 69341 - protein, 351 aa, Oceanobacillus iheyensis HTE831; identical to SEQ ID NO: 32757

SEQ ID NO: 69342 - DNA, 1041 bp, Rhodopirellula baltica SH 1; identical to SEQ ID NO: 32758
  CDS (1)..(1041): transl_table=11

SEQ ID NO: 69343 - protein, 346 aa, Rhodopirellula baltica SH 1; identical to SEQ ID NO: 32759

SEQ ID NO: 69344 - DNA, 1029 bp, Legionella pneumophila subsp. pneumophila str. Philadelphia 1; identical to SEQ ID NO: 32760
  CDS (1)..(1029): transl_table=11

SEQ ID NO: 69345 - protein, 342 aa, Legionella pneumophila subsp. pneumophila str. Philadelphia 1; identical to SEQ ID NO: 32761

SEQ ID NO: 69346 - DNA, 984 bp, Photobacterium profundum SS9; identical to SEQ ID NO: 32762
  CDS (1)..(984): transl_table=11

SEQ ID NO: 69347 - protein, 327 aa, Photobacterium profundum SS9; identical to SEQ ID NO: 32763

SEQ ID NO: 69348 - DNA, 1044 bp, Silicibacter pomeroyi DSS-3; identical to SEQ ID NO: 32764
  CDS (1)..(1044): transl_table=11

SEQ ID NO: 69349 - protein, 347 aa, Silicibacter pomeroyi DSS-3; identical to SEQ ID NO: 32765

SEQ ID NO: 69350 - DNA, 1074 bp, Staphylococcus haemolyticus JCSC1435; identical to SEQ ID NO: 32766
  CDS (1)..(1074): transl_table=11

SEQ ID NO: 69351 - protein, 357 aa, Staphylococcus haemolyticus JCSC1435; identical to SEQ ID NO: 32767

SEQ ID NO: 69352 - DNA, 1026 bp, Colwellia psychrerythraea 34H; identical to SEQ ID NO: 32768
  CDS (1)..(1026): transl_table=11

SEQ ID NO: 69353 - protein, 341 aa, Colwellia psychrerythraea 34H; identical to SEQ ID NO: 32769

SEQ ID NO: 69354 - DNA, 1071 bp, Staphylococcus saprophyticus subsp. saprophyticus ATCC 15305; identical to SEQ ID NO: 32770
  CDS (1)..(1071): transl_table=11

SEQ ID NO: 69355 - protein, 356 aa, Staphylococcus saprophyticus subsp. saprophyticus ATCC 15305; identical to SEQ ID NO: 32771

SEQ ID NO: 69356 - DNA, 1029 bp, Burkholderia vietnamiensis G4; identical to SEQ ID NO: 32772
  CDS (1)..(1029): transl_table=11

SEQ ID NO: 69357 - protein, 342 aa, Burkholderia vietnamiensis G4; identical to SEQ ID NO: 32773

SEQ ID NO: 69358 - DNA, 1026 bp, Shewanella amazonensis SB2B; identical to SEQ ID NO: 32774
  CDS (1)..(1026): transl_table=11

SEQ ID NO: 69359 - protein, 341 aa, Shewanella amazonensis SB2B; identical to SEQ ID NO: 32775

SEQ ID NO: 69360 - DNA, 1047 bp, Pseudomonas putida; identical to SEQ ID NO: 32776
  CDS (1)..(1047): transl_table=11

SEQ ID NO: 69361 - protein, 348 aa, Pseudomonas putida; identical to SEQ ID NO: 32777

SEQ ID NO: 69362 - DNA, 1047 bp, Pseudomonas sp; identical to SEQ ID NO: 32778
  CDS (1)..(1047): transl_table=11

SEQ ID NO: 69363 - protein, 348 aa, Pseudomonas sp; identical to SEQ ID NO: 32779

SEQ ID NO: 69364 - DNA, 1047 bp, Pseudomonas putida; identical to SEQ ID NO: 32780
  CDS (1)..(1047): transl_table=11

SEQ ID NO: 69365 - protein, 348 aa, Pseudomonas putida; identical to SEQ ID NO: 32781

SEQ ID NO: 69366 - DNA, 1077 bp, Aspergillus niger; identical to SEQ ID NO: 32782
  CDS (1)..(1077)

SEQ ID NO: 69367 - protein, 358 aa, Aspergillus niger; identical to SEQ ID NO: 32783

SEQ ID NO: 69368 - DNA, 1044 bp, Caenorhabditis briggsae; identical to SEQ ID NO: 32784
  CDS (1)..(1044)

SEQ ID NO: 69369 - protein, 347 aa, Caenorhabditis briggsae; identical to SEQ ID NO: 32785

SEQ ID NO: 69370 - DNA, 1107 bp, Malus domestica; identical to SEQ ID NO: 32786
  CDS (1)..(1107)

SEQ ID NO: 69371 - protein, 368 aa, Malus domestica; identical to SEQ ID NO: 32787

SEQ ID NO: 69372 - DNA, 1032 bp, Bacillus halodurans; identical to SEQ ID NO: 32788
  CDS (1)..(1032): transl_table=11

SEQ ID NO: 69373 - protein, 343 aa, Bacillus halodurans; identical to SEQ ID NO: 32789

SEQ ID NO: 69374 - DNA, 1062 bp, Bacillus subtilis; identical to SEQ ID NO: 32746
  CDS (1)..(1062)

SEQ ID NO: 69375 - protein, 353 aa, Bacillus subtilis; identical to SEQ ID NO: 32747

SEQ ID NO: 69376 - DNA, 1044 bp, Bacillus subtilis; identical to SEQ ID NO: 32792
  CDS (1)..(1044): transl_table=11

SEQ ID NO: 69377 - protein, 347 aa, Bacillus subtilis; identical to SEQ ID NO: 32793

SEQ ID NO: 69378 - DNA, 1032 bp, Burkholderia mallei; identical to SEQ ID NO: 32794
  CDS (1)..(1032): transl_table=11

SEQ ID NO: 69379 - protein, 343 aa, Burkholderia mallei; identical to SEQ ID NO: 32795

SEQ ID NO: 69380 - DNA, 1026 bp, Chromobacterium violaceum; identical to SEQ ID NO: 32796
  CDS (1)..(1026): transl_table=11

SEQ ID NO: 69381 - protein, 341 aa, Chromobacterium violaceum; identical to SEQ ID NO: 32797

SEQ ID NO: 69382 - DNA, 1029 bp, Coxiella burnetii; identical to SEQ ID NO: 32798
  CDS (1)..(1029): transl_table=11

SEQ ID NO: 69383 - protein, 342 aa, Coxiella burnetii; identical to SEQ ID NO: 32799

SEQ ID NO: 69384 - DNA, 1047 bp, Deinococcus radiodurans; identical to SEQ ID NO: 32800
  CDS (1)..(1047)

SEQ ID NO: 69385 - protein, 348 aa, Deinococcus radiodurans; identical to SEQ ID NO: 32801

SEQ ID NO: 69386 - DNA, 1086 bp, Erwinia carotovora subsp; identical to SEQ ID NO: 32802
  CDS (1)..(1086): transl_table=11

SEQ ID NO: 69387 - protein, 361 aa, Erwinia carotovora subsp; identical to SEQ ID NO: 32803

SEQ ID NO: 69388 - DNA, 1056 bp, Francisella tularensis subsp; identical to SEQ ID NO: 32804
  CDS (1)..(1056): transl_table=11

SEQ ID NO: 69389 - protein, 351 aa, Francisella tularensis subsp; identical to SEQ ID NO: 32805

SEQ ID NO: 69390 - DNA, 1026 bp, Idiomarina loihiensis; identical to SEQ ID NO: 32806
  CDS (1)..(1026): transl_table=11

SEQ ID NO: 69391 - protein, 341 aa, Idiomarina loihiensis; identical to SEQ ID NO: 32807

SEQ ID NO: 69392 - DNA, 1023 bp, Legionella pneumophila; identical to SEQ ID NO: 32808
  CDS (1)..(1023): transl_table=11

SEQ ID NO: 69393 - protein, 340 aa, Legionella pneumophila; identical to SEQ ID NO: 32809

SEQ ID NO: 69394 - DNA, 1023 bp, Legionella pneumophila subsp; identical to SEQ ID NO: 32810
  CDS (1)..(1023)

SEQ ID NO: 69395 - protein, 340 aa, Legionella pneumophila subsp; identical to SEQ ID NO: 32811

SEQ ID NO: 69396 - DNA, 1029 bp, Parachlamydia sp; identical to SEQ ID NO: 32812
  CDS (1)..(1029): transl_table=11

SEQ ID NO: 69397 - protein, 342 aa, Parachlamydia sp; identical to SEQ ID NO: 32813

SEQ ID NO: 69398 - DNA, 1026 bp, Photorhabdus luminescens subsp; identical to SEQ ID NO: 32814
  CDS (1)..(1026): transl_table=11

SEQ ID NO: 69399 - protein, 341 aa, Photorhabdus luminescens subsp; identical to SEQ ID NO: 32815

SEQ ID NO: 69400 - DNA, 1032 bp, Photobacterium profundum; identical to SEQ ID NO: 32816
  CDS (1)..(1032)

SEQ ID NO: 69401 - protein, 343 aa, Photobacterium profundum; identical to SEQ ID NO: 32817

SEQ ID NO: 69402 - DNA, 1038 bp, Propionibacterium acnes; identical to SEQ ID NO: 32818
  CDS (1)..(1038): transl_table=11

SEQ ID NO: 69403 - protein, 345 aa, Propionibacterium acnes; identical to SEQ ID NO: 32819

SEQ ID NO: 69404 - DNA, 1047 bp, Pyrococcus abyssi; identical to SEQ ID NO: 32820
  CDS (1)..(1047): transl_table=11

SEQ ID NO: 69405 - protein, 348 aa, Pyrococcus abyssi; identical to SEQ ID NO: 32821

SEQ ID NO: 69406 - DNA, 1047 bp, Pyrococcus furiosus; identical to SEQ ID NO: 32822
  CDS (1)..(1047): transl_table=11

SEQ ID NO: 69407 - protein, 348 aa, Pyrococcus furiosus; identical to SEQ ID NO: 32823

SEQ ID NO: 69408 - DNA, 1047 bp, Pyrococcus horikoshii; identical to SEQ ID NO: 32824
  CDS (1)..(1047): transl_table=11

SEQ ID NO: 69409 - protein, 348 aa, Pyrococcus horikoshii; identical to SEQ ID NO: 32825

SEQ ID NO: 69410 - DNA, 1053 bp, Pyrococcus kodakaraensis; identical to SEQ ID NO: 32826
  CDS (1)..(1053): transl_table=11

SEQ ID NO: 69411 - protein, 350 aa, Pyrococcus kodakaraensis; identical to SEQ ID NO: 32827

SEQ ID NO: 69412 - DNA, 1035 bp, Rhizobium loti; identical to SEQ ID NO: 32828
  CDS (1)..(1035): transl_table=11

SEQ ID NO: 69413 - protein, 344 aa, Rhizobium loti; identical to SEQ ID NO: 32829

SEQ ID NO: 69414 - DNA, 1035 bp, Rhizobium meliloti; identical to SEQ ID NO: 32830
  CDS (1)..(1035): transl_table=11

SEQ ID NO: 69415 - protein, 344 aa, Rhizobium meliloti; identical to SEQ ID NO: 32831

SEQ ID NO: 69416 - DNA, 1026 bp, Shewanella oneidensis; identical to SEQ ID NO: 32832
  CDS (1)..(1026): transl_table=11

SEQ ID NO: 69417 - protein, 341 aa, Shewanella oneidensis; identical to SEQ ID NO: 32833

SEQ ID NO: 69418 - DNA, 1029 bp, Silicibacter pomeroyi; identical to SEQ ID NO: 32834
  CDS (1)..(1029)

SEQ ID NO: 69419 - protein, 342 aa, Silicibacter pomeroyi; identical to SEQ ID NO: 32835

SEQ ID NO: 69420 - DNA, 1029 bp, Streptomyces avermitilis; identical to SEQ ID NO: 32836
  CDS (1)..(1029): transl_table=11

SEQ ID NO: 69421 - protein, 342 aa, Streptomyces avermitilis; identical to SEQ ID NO: 32837

SEQ ID NO: 69422 - DNA, 1029 bp, Streptomyces coelicolor; identical to SEQ ID NO: 32838
  CDS (1)..(1029): transl_table=11

SEQ ID NO: 69423 - protein, 342 aa, Streptomyces coelicolor; identical to SEQ ID NO: 32839

SEQ ID NO: 69424 - DNA, 1056 bp, Symbiobacterium thermophilum; identical to SEQ ID NO: 32840
  CDS (1)..(1056): transl_table=11

SEQ ID NO: 69425 - protein, 351 aa, Symbiobacterium thermophilum; identical to SEQ ID NO: 32841

SEQ ID NO: 69426 - DNA, 1032 bp, Thermus thermophilus; identical to SEQ ID NO: 32842
  CDS (1)..(1032): transl_table=11

SEQ ID NO: 69427 - protein, 343 aa, Thermus thermophilus; identical to SEQ ID NO: 32843

SEQ ID NO: 69428 - DNA, 1032 bp, Thermus thermophilus; identical to SEQ ID NO: 32844
  CDS (1)..(1032): transl_table=11

SEQ ID NO: 69429 - protein, 343 aa, Thermus thermophilus; identical to SEQ ID NO: 32845

SEQ ID NO: 69430 - DNA, 1044 bp, Thermoanaerobacter tengcongensis; identical to SEQ ID NO: 32846
  CDS (1)..(1044)

SEQ ID NO: 69431 - protein, 347 aa, Thermoanaerobacter tengcongensis; identical to SEQ ID NO: 32847

SEQ ID NO: 69432 - DNA, 1032 bp, Vibrio cholerae; identical to SEQ ID NO: 32848
  CDS (1)..(1032): transl_table=11

SEQ ID NO: 69433 - protein, 343 aa, Vibrio cholerae; identical to SEQ ID NO: 32849

SEQ ID NO: 69434 - DNA, 1032 bp, Vibrio fischeri; identical to SEQ ID NO: 32850
  CDS (1)..(1032): transl_table=11

SEQ ID NO: 69435 - protein, 343 aa, Vibrio fischeri; identical to SEQ ID NO: 32851

SEQ ID NO: 69436 - DNA, 1032 bp, Vibrio parahaemolyticus; identical to SEQ ID NO: 32852
  CDS (1)..(1032): transl_table=11

SEQ ID NO: 69437 - protein, 343 aa, Vibrio parahaemolyticus; identical to SEQ ID NO: 32853

SEQ ID NO: 69438 - DNA, 1032 bp, Vibrio vulnificus; identical to SEQ ID NO: 32854
  CDS (1)..(1032): transl_table=11

SEQ ID NO: 69439 - protein, 343 aa, Vibrio vulnificus; identical to SEQ ID NO: 32855

SEQ ID NO: 69440 - DNA, 1032 bp, Vibrio vulnificus; identical to SEQ ID NO: 32856
  CDS (1)..(1032): transl_table=11

SEQ ID NO: 69441 - protein, 343 aa, Vibrio vulnificus; identical to SEQ ID NO: 32857

SEQ ID NO: 69442 - DNA, 1023 bp, Xanthomonas campestris pv; identical to SEQ ID NO: 32858
  CDS (1)..(1023): transl_table=11

SEQ ID NO: 69443 - protein, 340 aa, Xanthomonas campestris pv; identical to SEQ ID NO: 32859

SEQ ID NO: 69444 - DNA, 1026 bp, Yersinia pestis; identical to SEQ ID NO: 32860
  CDS (1)..(1026): transl_table=11

SEQ ID NO: 69445 - protein, 341 aa, Yersinia pestis; identical to SEQ ID NO: 32861

SEQ ID NO: 69446 - DNA, 1026 bp, Yersinia pseudotuberculosis; identical to SEQ ID NO: 32862
  CDS (1)..(1026): transl_table=11

SEQ ID NO: 69447 - protein, 341 aa, Yersinia pseudotuberculosis; identical to SEQ ID NO: 32863

SEQ ID NO: 69448 - DNA, 25 bp, Artificial sequence
  Primer sequence
atgaaagcgttatccaaactgaaag

SEQ ID NO: 69449 - DNA, 24 bp, Artificial sequence
  Primer sequence
ttaatcccagctcagaataacttt

SEQ ID NO: 69450 - protein, 375 aa, Artificial sequence; identical to SEQ ID NO: 32866
  Consensus
  Variant (2)..(3): Xaa in position 2 to 3 is any amino acid
  Variant (5)..(5): Xaa in position 5 is any amino acid
  Variant (7)..(11): Xaa in position 7 to 11 is any amino acid
  Variant (13)..(20): Xaa in position 13 to 20 is any amino acid
  Variant (21)..(21): Xaa in position 21 is any or no amino acid
  Variant (23)..(24): Xaa in position 23 to 24 is any amino acid
  Variant (26)..(27): Xaa in position 26 to 27 is any amino acid
  Variant (28)..(28): Xaa in position 28 is any or no amino acid
  Variant (35)..(38): Xaa in position 35 to 38 is any amino acid
  Variant (48)..(48): Xaa in position 48 is any amino acid
  Variant (50)..(51): Xaa in position 50 to 51 is any amino acid
  Variant (54)..(55): Xaa in position 54 to 55 is any amino acid
  Variant (56)..(64): Xaa in position 56 to 64 is any or no amino acid
  Variant (66)..(67): Xaa in position 66 to 67 is any or no amino acid
  Variant (69)..(70): Xaa in position 69 to 70 is any amino acid
  Variant (75)..(76): Xaa in position 75 to 76 is any amino acid
  Variant (78)..(78): Xaa in position 78 is any amino acid
  Variant (80)..(81): Xaa in position 80 to 81 is any amino acid
  Variant (84)..(85): Xaa in position 84 to 85 is any amino acid
  Variant (87)..(90): Xaa in position 87 to 90 is any amino acid
  Variant (93)..(93): Xaa in position 93 is any amino acid
  Variant (97)..(97): Xaa in position 97 is any amino acid
  Variant (99)..(99): Xaa in position 99 is any amino acid
  Variant (100)..(100): Xaa in position 100 is any or no amino acid
  Variant (103)..(103): Xaa in position 103 is any amino acid
  Variant (106)..(106): Xaa in position 106 is any amino acid
  Variant (108)..(109): Xaa in position 108 to 109 is any amino acid
  Variant (112)..(112): Xaa in position 112 is any amino acid
  Variant (114)..(115): Xaa in position 114 to 115 is any amino acid
  Variant (119)..(123): Xaa in position 119 to 123 is any amino acid
  Variant (127)..(129): Xaa in position 127 to 129 is any amino acid
  Variant (130)..(134): Xaa in position 130 to 134 is any or no amino acid
  Variant (136)..(136): Xaa in position 136 is any amino acid
  Variant (139)..(139): Xaa in position 139 is any amino acid
  Variant (142)..(142): Xaa in position 142 is any amino acid
  Variant (145)..(148): Xaa in position 145 to 148 is any amino acid
  Variant (150)..(151): Xaa in position 150 to 151 is any amino acid
  Variant (153)..(154): Xaa in position 153 to 154 is any amino acid
  Variant (155)..(155): Xaa in position 155 is any or no amino acid
  Variant (157)..(158): Xaa in position 157 to 158 is any amino acid
  Variant (160)..(160): Xaa in position 160 is any amino acid
  Variant (164)..(164): Xaa in position 164 is any amino acid
  Variant (167)..(167): Xaa in position 167 is any amino acid
  Variant (169)..(169): Xaa in position 169 is any amino acid
  Variant (173)..(180): Xaa in position 173 to 180 is any amino acid
  Variant (181)..(181): Xaa in position 181 is any or no amino acid
  Variant (183)..(184): Xaa in position 183 to 184 is any amino acid
  Variant (188)..(188): Xaa in position 188 is any amino acid
  Variant (190)..(190): Xaa in position 190 is any amino acid
  Variant (198)..(201): Xaa in position 198 to 201 is any amino acid
  Variant (203)..(204): Xaa in position 203 to 204 is any amino acid
  Variant (207)..(208): Xaa in position 207 to 208 is any amino acid
  Variant (211)..(211): Xaa in position 211 is any amino acid
  Variant (215)..(217): Xaa in position 215 to 217 is any amino acid
  Variant (218)..(218): Xaa in position 218 is any or no amino acid
  Variant (221)..(222): Xaa in position 221 to 222 is any amino acid
  Variant (224)..(225): Xaa in position 224 to 225 is any amino acid
  Variant (228)..(231): Xaa in position 228 to 231 is any amino acid
  Variant (232)..(232): Xaa in position 232 is any or no amino acid
  Variant (235)..(237): Xaa in position 235 to 237 is any amino acid
  Variant (238)..(247): Xaa in position 238 to 247 is any or no amino acid
  Variant (249)..(254): Xaa in position 249 to 254 is any amino acid
  Variant (255)..(262): Xaa in position 255 to 262 is any or no amino acid
  Variant (264)..(264): Xaa in position 264 is any amino acid
  Variant (267)..(267): Xaa in position 267 is any amino acid
  Variant (270)..(270): Xaa in position 270 is any amino acid
  Variant (273)..(275): Xaa in position 273 to 275 is any amino acid
  Variant (277)..(280): Xaa in position 277 to 280 is any amino acid
  Variant (282)..(283): Xaa in position 282 to 283 is any amino acid
  Variant (285)..(286): Xaa in position 285 to 286 is any amino acid
  Variant (289)..(289): Xaa in position 289 is any amino acid
  Variant (291)..(291): Xaa in position 291 is any amino acid
  Variant (296)..(306): Xaa in position 296 to 306 is any amino acid
  Variant (307)..(307): Xaa in position 307 is any or no amino acid
  Variant (310)..(310): Xaa in position 310 is any amino acid
  Variant (312)..(312): Xaa in position 312 is any amino acid
  Variant (314)..(314): Xaa in position 314 is any amino acid
  Variant (316)..(316): Xaa in position 316 is any amino acid
  Variant (319)..(319): Xaa in position 319 is any amino acid
  Variant (322)..(322): Xaa in position 322 is any or no amino acid
  Variant (325)..(325): Xaa in position 325 is any amino acid
  Variant (328)..(332): Xaa in position 328 to 332 is any amino acid
  Variant (335)..(335): Xaa in position 335 is any amino acid
  Variant (338)..(339): Xaa in position 338 to 339 is any amino acid
  Variant (340)..(341): Xaa in position 340 to 341 is any or no amino acid
  Variant (343)..(344): Xaa in position 343 to 344 is any amino acid
  Variant (349)..(357): Xaa in position 349 to 357 is any amino acid
  Variant (358)..(358): Xaa in position 358 is any or no amino acid
  Variant (361)..(362): Xaa in position 361 to 362 is any amino acid
  Variant (364)..(365): Xaa in position 364 to 365 is any amino acid
  Variant (367)..(369): Xaa in position 367 to 369 is any amino acid
  Variant (370)..(371): Xaa in position 370 to 371 is any or no amino acid

SEQ ID NO: 69451 - protein, 11 aa, Artificial sequence
  Consensus
  Variant (6)..(7): Xaa in position 6 to 7 is any amino acid
  Variant (9)..(10): Xaa in position 9 to 10 is any amino acid
ICGTDXXIXXW

SEQ ID NO: 69452 - protein, 21 aa, Artificial sequence
  Consensus
  Variant (4)..(4): Xaa in position 4 is any amino acid
  Variant (5)..(5): Xaa in position 5 is Ala, Ser or Val
  Variant (7)..(7): Xaa in position 7 is any amino acid
  Variant (8)..(8): Xaa in position 8 is Ile or Val
  Variant (9)..(9): Xaa in position 9 is any amino acid
  Variant (10)..(10): Xaa in position 10 is Ala, Asp, Glu, Gly or Gln
  Variant (11)..(11): Xaa in position 11 is Phe, Ile, Leu, Met or Val
  Variant (13)..(13): Xaa in position 13 is any amino acid
  Variant (14)..(14): Xaa in position 14 is Ala, Asp, Glu, Gly, Asn or Ser
  Variant (16)..(19): Xaa in position 16 to 19 is any amino acid
  Variant (20)..(20): Xaa in position 20 is Ile, Leu, Pro or Val
GHEXXGXXXXXGXXVXXXXXG

SEQ ID NO: 69453 - protein, 36 aa, Artificial sequence; identical to SEQ ID NO: 32869
  Consensus
  Variant (2)..(2): Xaa in position 2 is any amino acid
  Variant (5)..(5): Xaa in position 5 is Ile or Val
  Variant (7)..(8): Xaa in position 7 to 8 is any amino acid
  Variant (9)..(9): Xaa in position 9 is Ala, Cys, Gly, Asn or Ser
  Variant (10)..(12): Xaa in position 10 to 12 is any amino acid
  Variant (13)..(13): Xaa in position 13 is Ala, Cys or Val
  Variant (14)..(16): Xaa in position 14 to 16 is any amino acid
  Variant (19)..(20): Xaa in position 19 to 20 is any amino acid
  Variant (21)..(22): Xaa in position 21 to 22 is any or no amino acid
  Variant (24)..(24): Xaa in position 24 is any amino acid
  Variant (25)..(26): Xaa in position 25 to 26 is any or no amino acid
  Variant (28)..(31): Xaa in position 28 to 31 is any amino acid
  Variant (34)..(35): Xaa in position 34 to 35 is any amino acid

SEQ ID NO: 69454 - DNA, 609 bp, Escherichia coli; identical to SEQ ID NO: 48336
  CDS (1)..(609)

SEQ ID NO: 69455 - protein, 202 aa, Escherichia coli; identical to SEQ ID NO: 48337

SEQ ID NO: 69456 - DNA, 552 bp, Vibrio cholerae O1 biovar eltor str. N16961; identical to SEQ ID NO: 48338
  CDS (1)..(552): transl_table=11

SEQ ID NO: 69457 - protein, 183 aa, Vibrio cholerae O1 biovar eltor str. N16961; identical to SEQ ID NO: 48339

SEQ ID NO: 69458 - DNA, 513 bp, Pasteurella multocida subsp. multocida str. Pm70; identical to SEQ ID NO: 48340
  CDS (1)..(513): transl_table=11

SEQ ID NO: 69459 - protein, 170 aa, Pasteurella multocida subsp. multocida str. Pm70; identical to SEQ ID NO: 48341

SEQ ID NO: 69460 - DNA, 537 bp, Pseudomonas aeruginosa PAO1; identical to SEQ ID NO: 48342
  CDS (1)..(537): transl_table=11

SEQ ID NO: 69461 - protein, 178 aa, Pseudomonas aeruginosa PAO1; identical to SEQ ID NO: 48343

SEQ ID NO: 69462 - DNA, 498 bp, Escherichia coli O157:H7; identical to SEQ ID NO: 48344
  CDS (1)..(498): transl_table=11

SEQ ID NO: 69463 - protein, 165 aa, Escherichia coli O157:H7; identical to SEQ ID NO: 48345

SEQ ID NO: 69464 - DNA, 525 bp, Yersinia pestis CO92; identical to SEQ ID NO: 48346
  CDS (1)..(525): transl_table=11

SEQ ID NO: 69465 - protein, 174 aa, Yersinia pestis CO92; identical to SEQ ID NO: 48347

SEQ ID NO: 69466 - DNA, 498 bp, Salmonella typhimurium LT2; identical to SEQ ID NO: 48348
  CDS (1)..(498): transl_table=11

SEQ ID NO: 69467 - protein, 165 aa, Salmonella typhimurium LT2; identical to SEQ ID NO: 48349

SEQ ID NO: 69468 - DNA, 531 bp, Ralstonia solanacearum GMI1000; identical to SEQ ID NO: 48350
  CDS (1)..(531): transl_table=11

SEQ ID NO: 69469 - protein, 176 aa, Ralstonia solanacearum GMI1000; identical to SEQ ID NO: 48351

SEQ ID NO: 69470 - DNA, 567 bp, Yersinia pestis KIM; identical to SEQ ID NO: 48352
  CDS (1)..(567): transl_table=11

SEQ ID NO: 69471 - protein, 188 aa, Yersinia pestis KIM; identical to SEQ ID NO: 48353

SEQ ID NO: 69472 - DNA, 498 bp, Shigella flexneri 2a str. 301; identical to SEQ ID NO: 48354
  CDS (1)..(498): transl_table=11

SEQ ID NO: 69473 - protein, 165 aa, Shigella flexneri 2a str. 301; identical to SEQ ID NO: 48355

SEQ ID NO: 69474 - DNA, 570 bp, Shewanella oneidensis MR-1; identical to SEQ ID NO: 48356
  CDS (1)..(570): transl_table=11

SEQ ID NO: 69475 - protein, 189 aa, Shewanella oneidensis MR-1; identical to SEQ ID NO: 48357

SEQ ID NO: 69476 - DNA, 558 bp, Pseudomonas putida KT2440; identical to SEQ ID NO: 48358
  CDS (1)..(558): transl_table=11

SEQ ID NO: 69477 - protein, 185 aa, Pseudomonas putida KT2440; identical to SEQ ID NO: 48359

SEQ ID NO: 69478 - DNA, 498 bp, Escherichia coli CFT073; identical to SEQ ID NO: 48360
  CDS (1)..(498): transl_table=11

SEQ ID NO: 69479 - protein, 165 aa, Escherichia coli CFT073; identical to SEQ ID NO: 48361

SEQ ID NO: 69480 - DNA, 540 bp, Vibrio vulnificus CMCP6; identical to SEQ ID NO: 48362
  CDS (1)..(540): transl_table=11

SEQ ID NO: 69481 - protein, 179 aa, Vibrio vulnificus CMCP6; identical to SEQ ID NO: 48363

SEQ ID NO: 69482 - DNA, 561 bp, Pseudomonas syringae pv. tomato str. DC3000; identical to SEQ ID NO: 48364
  CDS (1)..(561): transl_table=11

SEQ ID NO: 69483 - protein, 186 aa, Pseudomonas syringae pv. tomato str. DC3000; identical to SEQ ID NO: 48365

SEQ ID NO: 69484 - DNA, 552 bp, Vibrio parahaemolyticus RIMD 2210633; identical to SEQ ID NO: 48366
  CDS (1)..(552): transl_table=11

SEQ ID NO: 69485 - protein, 183 aa, Vibrio parahaemolyticus RIMD 2210633; identical to SEQ ID NO: 48367

SEQ ID NO: 69486 - DNA, 498 bp, Salmonella enterica subsp. enterica serovar Typhi Ty2; identical to SEQ ID NO: 48368
  CDS (1)..(498): transl_table=11

SEQ ID NO: 69487 - protein, 165 aa, Salmonella enterica subsp. enterica serovar Typhi Ty2; identical to SEQ ID NO: 48369

SEQ ID NO: 69488 - DNA, 558 bp, Coxiella burnetii RSA 493; identical to SEQ ID NO: 48370
  CDS (1)..(558): transl_table=11

SEQ ID NO: 69489 - protein, 185 aa, Coxiella burnetii RSA 493; identical to SEQ ID NO: 48371

SEQ ID NO: 69490 - DNA, 537 bp, Nitrosomonas europaea ATCC 19718; identical to SEQ ID NO: 48372
  CDS (1)..(537): transl_table=11

SEQ ID NO: 69491 - protein, 178 aa, Nitrosomonas europaea ATCC 19718; identical to SEQ ID NO: 48373

SEQ ID NO: 69492 - DNA, 573 bp, Bordetella bronchiseptica RB50; identical to SEQ ID NO: 48374
  CDS (1)..(573): transl_table=11

SEQ ID NO: 69493 - protein, 190 aa, Bordetella bronchiseptica RB50; identical to SEQ ID NO: 48375

SEQ ID NO: 69494 - DNA, 519 bp, Photorhabdus luminescens subsp. laumondii TTO1; identical to SEQ ID NO: 48376
  CDS (1)..(519): transl_table=11

SEQ ID NO: 69495 - protein, 172 aa, Photorhabdus luminescens subsp. laumondii TTO1; identical to SEQ ID NO: 48377

SEQ ID NO: 69496 - DNA, 552 bp, Vibrio vulnificus YJ016; identical to SEQ ID NO: 48378
  CDS (1)..(552): transl_table=11

SEQ ID NO: 69497 - protein, 183 aa, Vibrio vulnificus YJ016; identical to SEQ ID NO: 48379

SEQ ID NO: 69498 - DNA, 519 bp, Bartonella quintana str. Toulouse; identical to SEQ ID NO: 48380
  CDS (1)..(519): transl_table=11

SEQ ID NO: 69499 - protein, 172 aa, Bartonella quintana str. Toulouse; identical to SEQ ID NO: 48381

SEQ ID NO: 69500 - DNA, 516 bp, Bartonella henselae str. Houston-1; identical to SEQ ID NO: 48382
  CDS (1)..(516): transl_table=11

SEQ ID NO: 69501 - protein, 171 aa, Bartonella henselae str. Houston-1; identical to SEQ ID NO: 48383

SEQ ID NO: 69502 - DNA, 504 bp, Acinetobacter sp. ADP1; identical to SEQ ID NO: 48384
  CDS (1)..(504): transl_table=11

SEQ ID NO: 69503 - protein, 167 aa, Acinetobacter sp. ADP1; identical to SEQ ID NO: 48385

SEQ ID NO: 69504 - DNA, 534 bp, Erwinia carotovora subsp. atroseptica SCRI1043; identical to SEQ ID NO: 48386
  CDS (1)..(534): transl_table=11

SEQ ID NO: 69505 - protein, 177 aa, Erwinia carotovora subsp. atroseptica SCRI1043; identical to SEQ ID NO: 48387

SEQ ID NO: 69506 - DNA, 594 bp, Burkholderia mallei ATCC 23344; identical to SEQ ID NO: 48388
  CDS (1)..(594): transl_table=11

SEQ ID NO: 69507 - protein, 197 aa, Burkholderia mallei ATCC 23344; identical to SEQ ID NO: 48389

SEQ ID NO: 69508 - DNA, 489 bp, Methylococcus capsulatus str. Bath; identical to SEQ ID NO: 48390
  CDS (1)..(489): transl_table=11

SEQ ID NO: 69509 - protein, 162 aa, Methylococcus capsulatus str. Bath; identical to SEQ ID NO: 48391

SEQ ID NO: 69510 - DNA, 543 bp, Photobacterium profundum SS9; identical to SEQ ID NO: 48392
  CDS (1)..(543): transl_table=11

SEQ ID NO: 69511 - protein, 180 aa, Photobacterium profundum SS9; identical to SEQ ID NO: 48393

SEQ ID NO: 69512 - DNA, 582 bp, Idiomarina loihiensis L2TR; identical to SEQ ID NO: 48394
  CDS (1)..(582): transl_table=11

SEQ ID NO: 69513 - protein, 193 aa, Idiomarina loihiensis L2TR; identical to SEQ ID NO: 48395

SEQ ID NO: 69514 - DNA, 558 bp, Azoarcus sp. EbN1; identical to SEQ ID NO: 48396
  CDS (1)..(558): transl_table=11

SEQ ID NO: 69515 - protein, 185 aa, Azoarcus sp. EbN1; identical to SEQ ID NO: 48397

SEQ ID NO: 69516 - DNA, 543 bp, Vibrio fischeri ES114; identical to SEQ ID NO: 48398
  CDS (1)..(543): transl_table=11

SEQ ID NO: 69517 - protein, 180 aa, Vibrio fischeri ES114; identical to SEQ ID NO: 48399

SEQ ID NO: 69518 - DNA, 498 bp, Salmonella enterica subsp. enterica serovar Choleraesuis str; identical to SEQ ID NO: 48400
  CDS (1)..(498): transl_table=11

SEQ ID NO: 69519 - protein, 165 aa, Salmonella enterica subsp. enterica serovar Choleraesuis str; identical to SEQ ID NO: 48401

SEQ ID NO: 69520 - DNA, 561 bp, Pseudomonas syringae pv. syringae B728a; identical to SEQ ID NO: 48402
  CDS (1)..(561): transl_table=11

SEQ ID NO: 69521 - protein, 186 aa, Pseudomonas syringae pv. syringae B728a; identical to SEQ ID NO: 48403

SEQ ID NO: 69522 - DNA, 504 bp, Haemophilus somnus 129PT; identical to SEQ ID NO: 48404
  CDS (1)..(504)

SEQ ID NO: 69523 - protein, 167 aa, Haemophilus somnus 129PT; identical to SEQ ID NO: 48405

SEQ ID NO: 69524 - DNA, 507 bp, Pseudomonas syringae pv. syringae B728a; identical to SEQ ID NO: 48406
  CDS (1)..(507)

SEQ ID NO: 69525 - protein, 168 aa, Pseudomonas syringae pv. syringae B728a; identical to SEQ ID NO: 48407

SEQ ID NO: 69526 - DNA, 483 bp, Actinobacillus pleuropneumoniae serovar 1 str. 4074; identical to SEQ ID NO: 48408
  CDS (1)..(483)

SEQ ID NO: 69527 - protein, 160 aa, Actinobacillus pleuropneumoniae serovar 1 str. 4074; identical to SEQ ID NO: 48409

SEQ ID NO: 69528 - DNA, 537 bp, Pseudomonas aeruginosa UCBPP-PA14; identical to SEQ ID NO: 48410
  CDS (1)..(537)

SEQ ID NO: 69529 - protein, 178 aa, Pseudomonas aeruginosa UCBPP-PA14; identical to SEQ ID NO: 48411

SEQ ID NO: 69530 - DNA, 507 bp, Psychrobacter sp. 273-4; identical to SEQ ID NO: 48412
  CDS (1)..(507)

SEQ ID NO: 69531 - protein, 168 aa, Psychrobacter sp. 273-4; identical to SEQ ID NO: 48413

SEQ ID NO: 69532 - DNA, 597 bp, Burkholderia cepacia R18194; identical to SEQ ID NO: 48414
  CDS (1)..(597)

SEQ ID NO: 69533 - protein, 198 aa, Burkholderia cepacia R18194; identical to SEQ ID NO: 48415

SEQ ID NO: 69534 - DNA, 552 bp, Pseudomonas fluorescens PfO-1; identical to SEQ ID NO: 48416
  CDS (1)..(552)

SEQ ID NO: 69535 - protein, 183 aa, Pseudomonas fluorescens PfO-1; identical to SEQ ID NO: 48417

SEQ ID NO: 69536 - DNA, 558 bp, Pseudomonas fluorescens PfO-1; identical to SEQ ID NO: 48418
  CDS (1)..(558)

SEQ ID NO: 69537 - protein, 185 aa, Pseudomonas fluorescens PfO-1; identical to SEQ ID NO: 48419

SEQ ID NO: 69538 - DNA, 684 bp, Burkholderia fungorum LB400; identical to SEQ ID NO: 48420
  CDS (1)..(684)

SEQ ID NO: 69539 - protein, 227 aa, Burkholderia fungorum LB400; identical to SEQ ID NO: 48421

SEQ ID NO: 69540 - DNA, 564 bp, Thiobacillus denitrificans ATCC 25259; identical to SEQ ID NO: 48422
  CDS (1)..(564)

SEQ ID NO: 69541 - protein, 187 aa, Thiobacillus denitrificans ATCC 25259; identical to SEQ ID NO: 48423

SEQ ID NO: 69542 - DNA, 531 bp, Dechloromonas aromatica RCB; identical to SEQ ID NO: 48424
  CDS (1)..(531)

SEQ ID NO: 69543 - protein, 176 aa, Dechloromonas aromatica RCB; identical to SEQ ID NO: 48425

SEQ ID NO: 69544 - DNA, 552 bp, Azotobacter vinelandii AvOP; identical to SEQ ID NO: 48426
  CDS (1)..(552): transl_table=11

SEQ ID NO: 69545 - protein, 183 aa, Azotobacter vinelandii AvOP; identical to SEQ ID NO: 48427

SEQ ID NO: 69546 - DNA, 597 bp, Burkholderia vietnamiensis G4; identical to SEQ ID NO: 48428
  CDS (1)..(597): transl_table=11

SEQ ID NO: 69547 - protein, 198 aa, Burkholderia vietnamiensis G4; identical to SEQ ID NO: 48429

SEQ ID NO: 69548 - DNA, 603 bp, Burkholderia mallei 10229; identical to SEQ ID NO: 48430
  CDS (1)..(603)

SEQ ID NO: 69549 - protein, 200 aa, Burkholderia mallei 10229; identical to SEQ ID NO: 48431

SEQ ID NO: 69550 - DNA, 597 bp, Burkholderia cenocepacia AU 1054; identical to SEQ ID NO: 48432
  CDS (1)..(597): transl_table=11

SEQ ID NO: 69551 - protein, 198 aa, Burkholderia cenocepacia AU 1054; identical to SEQ ID NO: 48433

SEQ ID NO: 69552 - DNA, 603 bp, Burkholderia pseudomallei 1655; identical to SEQ ID NO: 48434
  CDS (1)..(603)

SEQ ID NO: 69553 - protein, 200 aa, Burkholderia pseudomallei 1655; identical to SEQ ID NO: 48435

SEQ ID NO: 69554 - DNA, 552 bp, Chromohalobacter salexigens DSM 3043; identical to SEQ ID NO: 48436
  CDS (1)..(552): transl_table=11

SEQ ID NO: 69555 - protein, 183 aa, Chromohalobacter salexigens DSM 3043; identical to SEQ ID NO: 48437

SEQ ID NO: 69556 - DNA, 537 bp, Methylobacillus flagellatus KT; identical to SEQ ID NO: 48438
  CDS (1)..(537): transl_table=11

SEQ ID NO: 69557 - protein, 178 aa, Methylobacillus flagellatus KT; identical to SEQ ID NO: 48439

SEQ ID NO: 69558 - DNA, 564 bp, Shewanella baltica OS155; identical to SEQ ID NO: 48440
  CDS (1)..(564): transl_table=11

SEQ ID NO: 69559 - protein, 187 aa, Shewanella baltica OS155; identical to SEQ ID NO: 48441

SEQ ID NO: 69560 - DNA, 564 bp, Shewanella amazonensis SB2B; identical to SEQ ID NO: 48442
  CDS (1)..(564): transl_table=11

SEQ ID NO: 69561 - protein, 187 aa, Shewanella amazonensis SB2B; identical to SEQ ID NO: 48443

SEQ ID NO: 69562 - DNA, 615 bp, Shewanella frigidimarina NCIMB 400; identical to SEQ ID NO: 48444
  CDS (1)..(615): transl_table=11

SEQ ID NO: 69563 - protein, 204 aa, Shewanella frigidimarina NCIMB 400; identical to SEQ ID NO: 48445

SEQ ID NO: 69564 - DNA, 564 bp, Pseudomonas fluorescens; identical to SEQ ID NO: 48446
  CDS (1)..(564): transl_table=11

SEQ ID NO: 69565 - protein, 187 aa, Pseudomonas fluorescens; identical to SEQ ID NO: 48447

SEQ ID NO: 69566 - DNA, 609 bp, Xanthomonas albilineans; identical to SEQ ID NO: 48448
  CDS (1)..(609): transl_table=11

SEQ ID NO: 69567 - protein, 202 aa, Xanthomonas albilineans; identical to SEQ ID NO: 48449

SEQ ID NO: 69568 - DNA, 549 bp, Pseudomonas putida; identical to SEQ ID NO: 48450
  CDS (1)..(549): transl_table=11

SEQ ID NO: 69569 - protein, 182 aa, Pseudomonas putida; identical to SEQ ID NO: 48451

SEQ ID NO: 69570 - DNA, 549 bp, Pseudomonas sp; identical to SEQ ID NO: 48452
  CDS (1)..(549): transl_table=11

SEQ ID NO: 69571 - protein, 182 aa, Pseudomonas sp; identical to SEQ ID NO: 48453

SEQ ID NO: 69572 - DNA, 23 bp, Artificial sequence
  Primer sequence
atgcgattgttgcgtttttgttg

SEQ ID NO: 69573 - DNA, 22 bp, Artificial sequence
  Primer sequence
ttagtacaacggtgacgccggt

SEQ ID NO: 69574 - protein, 177 aa, Artificial sequence; identical to SEQ ID NO: 48456
  Consensus
  Variant (3)..(6): Xaa in position 3 to 6 is any amino acid
  Variant (10)..(19): Xaa in position 10 to 19 is any amino acid
  Variant (20)..(21): Xaa in position 20 to 21 is any or no amino acid
  Variant (23)..(41): Xaa in position 23 to 41 is any amino acid
  Variant (42)..(54): Xaa in position 42 to 54 is any or no amino acid
  Variant (59)..(59): Xaa in position 59 is any amino acid
  Variant (61)..(66): Xaa in position 61 to 66 is any amino acid
  Variant (67)..(67): Xaa in position 67 is any or no amino acid
  Variant (70)..(70): Xaa in position 70 is any amino acid
  Variant (72)..(72): Xaa in position 72 is any amino acid
  Variant (75)..(84): Xaa in position 75 to 84 is any amino acid
  Variant (85)..(101): Xaa in position 85 to 101 is any or no amino acid
  Variant (103)..(103): Xaa in position 103 is any amino acid
  Variant (104)..(104): Xaa in position 104 is any or no amino acid
  Variant (107)..(109): Xaa in position 107 to 109 is any amino acid
  Variant (112)..(113): Xaa in position 112 to 113 is any amino acid
  Variant (116)..(121): Xaa in position 116 to 121 is any amino acid
  Variant (123)..(124): Xaa in position 123 to 124 is any amino acid
  Variant (126)..(131): Xaa in position 126 to 131 is any amino acid
  Variant (132)..(154): Xaa in position 132 to 154 is any or no amino acid
  Variant (156)..(156): Xaa in position 156 is any amino acid
  Variant (161)..(168): Xaa in position 161 to 168 is any amino acid
  Variant (172)..(172): Xaa in position 172 is any amino acid
  Variant (174)..(174): Xaa in position 174 is any amino acid

SEQ ID NO: 69575 - protein, 9 aa, Artificial sequence
  Consensus
  Variant (2)..(2): Xaa in position 2 is Leu or Val
  Variant (3)..(5): Xaa in position 3 to 5 is any amino acid
  Variant (6)..(6): Xaa in position 6 is Asp, Gly, Ser or Thr
  Variant (8)..(8): Xaa in position 8 is Leu, Met or Val
WXXXXXSXT

SEQ ID NO: 69576 - protein, 17 aa, Artificial sequence
  Consensus
  Variant (3)..(3): Xaa in position 3 is Ile or Val
  Variant (4)..(4): Xaa in position 4 is any amino acid
  Variant (6)..(8): Xaa in position 6 to 8 is any amino acid
  Variant (9)..(9): Xaa in position 9 is Asp, Glu, Gly, Asn or Gln
  Variant (10)..(14): Xaa in position 10 to 14 is any amino acid
  Variant (15)..(15): Xaa in position 15 is Ala, Gly or Gln
  Variant (16)..(16): Xaa in position 16 is any amino acid
  Variant (17)..(17): Xaa in position 17 is Gln, Ser or Thr
REXXLXXXXXXXXXXXX

SEQ ID NO: 69577 - protein, 10 aa, Artificial sequence
  Consensus
  Variant (2)..(3): Xaa in position 2 to 3 is any amino acid
  Variant (4)..(4): Xaa in position 4 is Ala, Pro or Ser
  Variant (5)..(5): Xaa in position 5 is Ile or Leu
  Variant (7)..(8): Xaa in position 7 to 8 is any amino acid
  Variant (9)..(9): Xaa in position 9 is Leu or Val
GXXXXGXXXF

SEQ ID NO: 69578 - protein, 23 aa, Artificial sequence
  Consensus
  Variant (2)..(3): Xaa in position 2 to 3 is any or no amino acid
  Variant (5)..(5): Xaa in position 5 is any or no amino acid
  Variant (7)..(14): Xaa in position 7 to 14 is any amino acid
  Variant (15)..(15): Xaa in position 15 is Ile, Leu, Met or Val
  Variant (16)..(16): Xaa in position 16 is Leu or Met
  Variant (17)..(17): Xaa in position 17 is Ile, Leu or Val
  Variant (18)..(18): Xaa in position 18 is any amino acid
  Variant (20)..(21): Xaa in position 20 to 21 is any amino acid
  Variant (23)..(23): Xaa in position 23 is Ala, Pro or Ser
RXXRXSXXXXXXXXXXXXEXXLX

SEQ ID NO: 69579 - DNA, 1123 bp, Saccharomyces cerevisiae; identical to SEQ ID NO: 59015
  CDS (263)..(955)

SEQ ID NO: 69580 - protein, 230 aa, Saccharomyces cerevisiae; identical to SEQ ID NO: 59016

SEQ ID NO: 69581 - DNA, 642 bp, Eremothecium gossypii; identical to SEQ ID NO: 59017
  CDS (1)..(642)

SEQ ID NO: 69582 - protein, 213 aa, Eremothecium gossypii; identical to SEQ ID NO: 59018

SEQ ID NO: 69583 - DNA, 636 bp, Candida glabrata CBS138; identical to SEQ ID NO: 59019
  CDS (1)..(636)

SEQ ID NO: 69584 - protein, 211 aa, Candida glabrata CBS138; identical to SEQ ID NO: 59020

SEQ ID NO: 69585 - DNA, 567 bp, Kluyveromyces lactis NRRL Y-1140; identical to SEQ ID NO: 59021
  CDS (1)..(567)

SEQ ID NO: 69586 - protein, 188 aa, Kluyveromyces lactis NRRL Y-1140; identical to SEQ ID NO: 59022

SEQ ID NO: 69587 - DNA, 642 bp, Debaryomyces hansenii CBS767; identical to SEQ ID NO: 59023
  CDS (1)..(642)

SEQ ID NO: 69588 - protein, 213 aa, Debaryomyces hansenii CBS767; identical to SEQ ID NO: 59024

SEQ ID NO: 69589 - DNA, 25 bp, Artificial sequence
  Primer sequence
atgcgtaagccttctattacgataa

SEQ ID NO: 69590 - DNA, 26 bp, Artificial sequence
  Primer sequence
ttataaccttgtacctaatgtctcat

SEQ ID NO: 69591 - protein, 232 aa, Artificial sequence; identical to SEQ ID NO: 59027
  Consensus
  Variant (2)..(2): Xaa in position 2 is any amino acid
  Variant (4)..(4): Xaa in position 4 is any amino acid
  Variant (10)..(13): Xaa in position 10 to 13 is any amino acid
  Variant (16)..(20): Xaa in position 16 to 20 is any amino acid
  Variant (22)..(22): Xaa in position 22 is any amino acid
  Variant (24)..(33): Xaa in position 24 to 33 is any amino acid
  Variant (34)..(40): Xaa in position 34 to 40 is any or no amino acid
  Variant (42)..(44): Xaa in position 42 to 44 is any amino acid
  Variant (49)..(49): Xaa in position 49 is any amino acid
  Variant (53)..(54): Xaa in position 53 to 54 is any amino acid
  Variant (57)..(57): Xaa in position 57 is any amino acid
  Variant (59)..(59): Xaa in position 59 is any amino acid
  Variant (66)..(67): Xaa in position 66 to 67 is any amino acid
  Variant (71)..(71): Xaa in position 71 is any amino acid
  Variant (74)..(75): Xaa in position 74 to 75 is any amino acid
  Variant (77)..(77): Xaa in position 77 is any amino acid
  Variant (79)..(80): Xaa in position 79 to 80 is any amino acid
  Variant (83)..(84): Xaa in position 83 to 84 is any amino acid
  Variant (86)..(91): Xaa in position 86 to 91 is any amino acid
  Variant (92)..(108): Xaa in position 92 to 108 is any or no amino acid
  Variant (110)..(114): Xaa in position 110 to 114 is any amino acid
  Variant (116)..(117): Xaa in position 116 to 117 is any amino acid
  Variant (120)..(120): Xaa in position 120 is any amino acid
  Variant (123)..(123): Xaa in position 123 is any amino acid
  Variant (126)..(126): Xaa in position 126 is any amino acid
  Variant (128)..(128): Xaa in position 128 is any or no amino acid
  Variant (130)..(136): Xaa in position 130 to 136 is any amino acid
  Variant (137)..(142): Xaa in position 137 to 142 is any or no amino acid
  Variant (145)..(146): Xaa in position 145 to 146 is any amino acid
  Variant (149)..(150): Xaa in position 149 to 150 is any amino acid
  Variant (153)..(153): Xaa in position 153 is any amino acid
  Variant (162)..(162): Xaa in position 162 is any amino acid
  Variant (164)..(164): Xaa in position 164 is any amino acid
  Variant (166)..(196): Xaa in position 166 to 196 is any amino acid
  Variant (197)..(216): Xaa in position 197 to 216 is any or no amino acid
  Variant (219)..(220): Xaa in position 219 to 220 is any amino acid
  Variant (223)..(223): Xaa in position 223 is any amino acid
  Variant (227)..(227): Xaa in position 227 is any amino acid
  Variant (229)..(230): Xaa in position 229 to 230 is any amino acid

SEQ ID NO: 69592 - protein, 29 aa, Artificial sequence
  Consensus
  Variant (5)..(5): Xaa in position 5 is Phe, Ile, Leu or Met
  Variant (7)..(7): Xaa in position 7 is Leu or Met
  Variant (8)..(8): Xaa in position 8 is Lys or Arg
  Variant (9)..(9): Xaa in position 9 is Pro or Gln
  Variant (10)..(10): Xaa in position 10 is Phe or Leu
  Variant (11)..(11): Xaa in position 11 is Ile or Val
  Variant (12)..(12): Xaa in position 12 is Ala or Ser
  Variant (13)..(15): Xaa in position 13 to 15 is any amino acid
  Variant (17)..(17): Xaa in position 17 is Ile or Val
  Variant (19)..(19): Xaa in position 19 is Asp or Glu
  Variant (20)..(20): Xaa in position 20 is Ser or Thr
  Variant (22)..(22): Xaa in position 22 is any amino acid
  Variant (23)..(23): Xaa in position 23 is Asp, Asn or Thr
  Variant (25)..(25): Xaa in position 25 is Ile, Leu or Val
  Variant (27)..(27): Xaa in position 27 is any amino acid
  Variant (29)..(29): Xaa in position 29 is Phe or Tyr
YRRFXRXXXXXXXXXMXKXXYXXYXRXKX

SEQ ID NO: 69593 - protein, 9 aa, Artificial sequence
  Consensus
  Variant (2)..(2): Xaa in position 2 is any amino acid
  Variant (4)..(4): Xaa in position 4 is Ile, Leu or Val
  Variant (5)..(5): Xaa in position 5 is Ala, Ile or Leu
  Variant (7)..(7): Xaa in position 7 is Ala or Ser
  Variant (8)..(8): Xaa in position 8 is any amino acid
LXFXXKXXS

SEQ ID NO: 69594 - protein, 17 aa, Artificial sequence
  Consensus
  Variant (2)..(2): Xaa in position 2 is Asn or Ser
  Variant (3)..(4): Xaa in position 3 to 4 is any amino acid
  Variant (6)..(6): Xaa in position 6 is Lys or Arg
  Variant (7)..(7): Xaa in position 7 is any amino acid
  Variant (9)..(9): Xaa in position 9 is Ile or Leu
  Variant (12)..(12): Xaa in position 12 is Leu or Val
  Variant (15)..(15): Xaa in position 15 is Ile, Leu, Met or Val
  Variant (16)..(16): Xaa in position 16 is any amino acid
DXXXCXXIXKNXLTXXY

SEQ ID NO: 69595 - protein, 8 aa, Artificial sequence
  Consensus
  Variant (2)..(2): Xaa in position 2 is Glu or Asn
  Variant (3)..(3): Xaa in position 3 is any amino acid
  Variant (5)..(5): Xaa in position 5 is Gly or Asn
  Variant (6)..(6): Xaa in position 6 is any amino acid
NXXLXXRL

SEQ ID NO: 69596 - DNA, 1203 bp, Escherichia coli; identical to SEQ ID NO: 13945
  CDS (1)..(1203)

SEQ ID NO: 69597 - protein, 400 aa, Escherichia coli; identical to SEQ ID NO: 13946

SEQ ID NO: 69598 - DNA, 1281 bp, Aquifex aeolicus VF5; identical to SEQ ID NO: 13947
  CDS (1)..(1281): transl_table=11

SEQ ID NO: 69599 - protein, 426 aa, Aquifex aeolicus VF5; identical to SEQ ID NO: 13948

SEQ ID NO: 69600 - DNA, 1260 bp, Neisseria meningitidis Z2491; identical to SEQ ID NO: 13949
  CDS (1)..(1260): transl_table=11

SEQ ID NO: 69601 - protein, 419 aa, Neisseria meningitidis Z2491; identical to SEQ ID NO: 13950

SEQ ID NO: 69602 - DNA, 1425 bp, Deinococcus radiodurans R1; identical to SEQ ID NO: 13951
  CDS (1)..(1425): transl_table=11

SEQ ID NO: 69603 - protein, 474 aa, Deinococcus radiodurans R1; identical to SEQ ID NO: 13952

SEQ ID NO: 69604 - DNA, 1392 bp, Mycobacterium tuberculosis CDC1551; identical to SEQ ID NO: 13953
  CDS (1)..(1392): transl_table=11

SEQ ID NO: 69605 - protein, 463 aa, Mycobacterium tuberculosis CDC1551; identical to SEQ ID NO: 13954

SEQ ID NO: 69606 - DNA, 1203 bp, Salmonella typhimurium LT2; identical to SEQ ID NO: 13955
  CDS (1)..(1203): transl_table=11

SEQ ID NO: 69607 - protein, 400 aa, Salmonella typhimurium LT2; identical to SEQ ID NO: 13956

SEQ ID NO: 69608 - DNA, 1320 bp, Agrobacterium tumefaciens str. C58; identical to SEQ ID NO: 13957
  CDS (1)..(1320): transl_table=11

SEQ ID NO: 69609 - protein, 439 aa, Agrobacterium tumefaciens str. C58; identical to SEQ ID NO: 13958

SEQ ID NO: 69610 - DNA, 1251 bp, Yersinia pestis KIM; identical to SEQ ID NO: 13959
  CDS (1)..(1251): transl_table=11

SEQ ID NO: 69611 - protein, 416 aa, Yersinia pestis KIM; identical to SEQ ID NO: 13960

SEQ ID NO: 69612 - DNA, 1314 bp, Thermosynechococcus elongatus BP-1; identical to SEQ ID NO: 13961
  CDS (1)..(1314): transl_table=11

SEQ ID NO: 69613 - protein, 437 aa, Thermosynechococcus elongatus BP-1; identical to SEQ ID NO: 13962

SEQ ID NO: 69614 - DNA, 1464 bp, Oceanobacillus iheyensis HTE831; identical to SEQ ID NO: 13963
  CDS (1)..(1464): transl_table=11

SEQ ID NO: 69615 - protein, 487 aa, Oceanobacillus iheyensis HTE831; identical to SEQ ID NO: 13964

SEQ ID NO: 69616 - DNA, 1209 bp, Pseudomonas putida KT2440; identical to SEQ ID NO: 13965
  CDS (1)..(1209): transl_table=11

SEQ ID NO: 69617 - protein, 402 aa, Pseudomonas putida KT2440; identical to SEQ ID NO: 13966

SEQ ID NO: 69618 - DNA, 1305 bp, Bradyrhizobium japonicum USDA 110; identical to SEQ ID NO: 13967
  CDS (1)..(1305)

SEQ ID NO: 69619 - protein, 434 aa, Bradyrhizobium japonicum USDA 110; identical to SEQ ID NO: 13968

SEQ ID NO: 69620 - DNA, 1434 bp, Lactobacillus plantarum WCFS1; identical to SEQ ID NO: 13969
  CDS (1)..(1434): transl_table=11

SEQ ID NO: 69621 - protein, 477 aa, Lactobacillus plantarum WCFS1; identical to SEQ ID NO: 13970

SEQ ID NO: 69622 - DNA, 1203 bp, Salmonella enterica subsp. enterica serovar Typhi Ty2; identical to SEQ ID NO: 13971
  CDS (1)..(1203): transl_table=11

SEQ ID NO: 69623 - protein, 400 aa, Salmonella enterica subsp. enterica serovar Typhi Ty2; identical to SEQ ID NO: 13972

SEQ ID NO: 69624 - DNA, 1170 bp, Bacteroides thetaiotaomicron VPI-5482; identical to SEQ ID NO: 13973
  CDS (1)..(1170): transl_table=11

SEQ ID NO: 69625 - protein, 389 aa, Bacteroides thetaiotaomicron VPI-5482; identical to SEQ ID NO: 13974

SEQ ID NO: 69626 - DNA, 1407 bp, Coxiella burnetii RSA 493; identical to SEQ ID NO: 13975
  CDS (1)..(1407): transl_table=11

SEQ ID NO: 69627 - protein, 468 aa, Coxiella burnetii RSA 493; identical to SEQ ID NO: 13976

SEQ ID NO: 69628 - DNA, 1185 bp, Porphyromonas gingivalis W83; identical to SEQ ID NO: 13977
  CDS (1)..(1185): transl_table=11

SEQ ID NO: 69629 - protein, 394 aa, Porphyromonas gingivalis W83; identical to SEQ ID NO: 13978

SEQ ID NO: 69630 - DNA, 1608 bp, Oryza sativa (japonica cultivar-group); identical to SEQ ID NO: 13979
  CDS (1)..(1608)

SEQ ID NO: 69631 - protein, 535 aa, Oryza sativa (japonica cultivar-group); identical to SEQ ID NO: 13980

SEQ ID NO: 69632 - DNA, 1446 bp, Geobacter sulfurreducens PCA; identical to SEQ ID NO: 13981
  CDS (1)..(1446): transl_table=11

SEQ ID NO: 69633 - protein, 481 aa, Geobacter sulfurreducens PCA; identical to SEQ ID NO: 13982

SEQ ID NO: 69634 - DNA, 1437 bp, Treponema denticola ATCC 35405; identical to SEQ ID NO: 13983
  CDS (1)..(1437): transl_table=11

SEQ ID NO: 69635 - protein, 478 aa, Treponema denticola ATCC 35405; identical to SEQ ID NO: 13984

SEQ ID NO: 69636 - DNA, 1293 bp, Eremothecium gossypii; identical to SEQ ID NO: 13985
  CDS (1)..(1293)

SEQ ID NO: 69637 - protein, 430 aa, Eremothecium gossypii; identical to SEQ ID NO: 13986

SEQ ID NO: 69638 - DNA, 1434 bp, Neurospora crassa; identical to SEQ ID NO: 13987
  CDS (1)..(1434)

SEQ ID NO: 69639 - protein, 477 aa, Neurospora crassa; identical to SEQ ID NO: 13988

SEQ ID NO: 69640 - DNA, 5916 bp, Magnaporthe grisea 70-15; identical to SEQ ID NO: 13989
  CDS (1)..(5916)

SEQ ID NO: 69641 - protein, 1971 aa, Magnaporthe grisea 70-15; identical to SEQ ID NO: 13990

SEQ ID NO: 69642 - DNA, 1380 bp, Gibberella zeae PH-1; identical to SEQ ID NO: 13991
  CDS (1)..(1380)

SEQ ID NO: 69643 - protein, 459 aa, Gibberella zeae PH-1; identical to SEQ ID NO: 13992

SEQ ID NO: 69644 - DNA, 1839 bp, Ustilago maydis 521; identical to SEQ ID NO: 13993
  CDS (1)..(1839)

SEQ ID NO: 69645 - protein, 612 aa, Ustilago maydis 521; identical to SEQ ID NO: 13994

SEQ ID NO: 69646 - DNA, 1464 bp, Aspergillus nidulans FGSC A4; identical to SEQ ID NO: 13995
  CDS (1)..(1464)

SEQ ID NO: 69647 - protein, 487 aa, Aspergillus nidulans FGSC A4; identical to SEQ ID NO: 13996

SEQ ID NO: 69648 - DNA, 1296 bp, Candida glabrata CBS138; identical to SEQ ID NO: 13997
  CDS (1)..(1296)

SEQ ID NO: 69649 - protein, 431 aa, Candida glabrata CBS138; identical to SEQ ID NO: 13998

SEQ ID NO: 69650 - DNA, 1284 bp, Kluyveromyces lactis NRRL Y-1140; identical to SEQ ID NO: 13999
  CDS (1)..(1284)

SEQ ID NO: 69651 - protein, 427 aa, Kluyveromyces lactis NRRL Y-1140; identical to SEQ ID NO: 14000

SEQ ID NO: 69652 - DNA, 1269 bp, Debaryomyces hansenii CBS767; identical to SEQ ID NO: 14001
  CDS (1)..(1269)

SEQ ID NO: 69653 - protein, 422 aa, Debaryomyces hansenii CBS767; identical to SEQ ID NO: 14002

SEQ ID NO: 69654 - DNA, 1245 bp, Yarrowia lipolytica CLIB99; identical to SEQ ID NO: 14003
  CDS (1)..(1245)

SEQ ID NO: 69655 - protein, 414 aa, Yarrowia lipolytica CLIB99; identical to SEQ ID NO: 14004

SEQ ID NO: 69656 - DNA, 1362 bp, Cryptococcus neoformans var. neoformans JEC21; identical to SEQ ID NO: 14005
  CDS (1)..(1362)

SEQ ID NO: 69657 - protein, 453 aa, Cryptococcus neoformans var. neoformans JEC21; identical to SEQ ID NO: 14006

SEQ ID NO: 69658 - DNA, 1173 bp, Entamoeba histolytica HM-1:IMSS; identical to SEQ ID NO: 14007
  CDS (1)..(1173)

SEQ ID NO: 69659 - protein, 390 aa, Entamoeba histolytica HM-1:IMSS; identical to SEQ ID NO: 14008

SEQ ID NO: 69660 - DNA, 1266 bp, Candida albicans SC5314; identical to SEQ ID NO: 14009
  CDS (1)..(1266): transl_table=12

SEQ ID NO: 69661 - protein, 421 aa, Candida albicans SC5314; identical to SEQ ID NO: 14010

SEQ ID NO: 69662 - DNA, 1305 bp, Bartonella quintana str. Toulouse; identical to SEQ ID NO: 14011
  CDS (1)..(1305): transl_table=11

SEQ ID NO: 69663 - protein, 434 aa, Bartonella quintana str. Toulouse; identical to SEQ ID NO: 14012

SEQ ID NO: 69664 - DNA, 1305 bp, Bartonella henselae str. Houston-1; identical to SEQ ID NO: 14013
  CDS (1)..(1305): transl_table=11

SEQ ID NO: 69665 - protein, 434 aa, Bartonella henselae str. Houston-1; identical to SEQ ID NO: 14014

SEQ ID NO: 69666 - DNA, 1470 bp, Bacillus licheniformis ATCC 14580; identical to SEQ ID NO: 14015
  CDS (1)..(1470): transl_table=11

SEQ ID NO: 69667 - protein, 489 aa, Bacillus licheniformis ATCC 14580; identical to SEQ ID NO: 14016

SEQ ID NO: 69668 - DNA, 1167 bp, Bacteroides fragilis YCH46; identical to SEQ ID NO: 14017
  CDS (1)..(1167): transl_table=11

SEQ ID NO: 69669 - protein, 388 aa, Bacteroides fragilis YCH46; identical to SEQ ID NO: 14018

SEQ ID NO: 69670 - DNA, 1350 bp, Methylococcus capsulatus str. Bath; identical to SEQ ID NO: 14019
  CDS (1)..(1350): transl_table=11

SEQ ID NO: 69671 - protein, 449 aa, Methylococcus capsulatus str. Bath; identical to SEQ ID NO: 14020

SEQ ID NO: 69672 - DNA, 1317 bp, Nocardia farcinica IFM 10152; identical to SEQ ID NO: 14021
  CDS (1)..(1317): transl_table=11

SEQ ID NO: 69673 - protein, 438 aa, Nocardia farcinica IFM 10152; identical to SEQ ID NO: 14022

SEQ ID NO: 69674 - DNA, 1404 bp, Legionella pneumophila str. Paris; identical to SEQ ID NO: 14023
  CDS (1)..(1404): transl_table=11

SEQ ID NO: 69675 - protein, 467 aa, Legionella pneumophila str. Paris; identical to SEQ ID NO: 14024

SEQ ID NO: 69676 - DNA, 1404 bp, Legionella pneumophila str. Lens; identical to SEQ ID NO: 14025
  CDS (1)..(1404): transl_table=11

SEQ ID NO: 69677 - protein, 467 aa, Legionella pneumophila str. Lens; identical to SEQ ID NO: 14026

SEQ ID NO: 69678 - DNA, 1473 bp, Geobacillus kaustophilus HTA426; identical to SEQ ID NO: 14027
  CDS (1)..(1473): transl_table=11

SEQ ID NO: 69679 - protein, 490 aa, Geobacillus kaustophilus HTA426; identical to SEQ ID NO: 14028

SEQ ID NO: 69680 - DNA, 1347 bp, Idiomarina loihiensis L2TR; identical to SEQ ID NO: 14029
  CDS (1)..(1347): transl_table=11

SEQ ID NO: 69681 - protein, 448 aa, Idiomarina loihiensis L2TR; identical to SEQ ID NO: 14030

SEQ ID NO: 69682 - DNA, 1344 bp, Silicibacter pomeroyi DSS-3; identical to SEQ ID NO: 14031
  CDS (1)..(1344): transl_table=11

SEQ ID NO: 69683 - protein, 447 aa, Silicibacter pomeroyi DSS-3; identical to SEQ ID NO: 14032

SEQ ID NO: 69684 - DNA, 1260 bp, Neisseria gonorrhoeae FA 1090; identical to SEQ ID NO: 14033
  CDS (1)..(1260): transl_table=11

SEQ ID NO: 69685 - protein, 419 aa, Neisseria gonorrhoeae FA 1090; identical to SEQ ID NO: 14034

SEQ ID NO: 69686 - DNA, 1167 bp, Bacteroides fragilis NCTC 9343; identical to SEQ ID NO: 14035
  CDS (1)..(1167): transl_table=11

SEQ ID NO: 69687 - protein, 388 aa, Bacteroides fragilis NCTC 9343; identical to SEQ ID NO: 14036

SEQ ID NO: 69688 - DNA, 1251 bp, Salmonella enterica subsp. enterica serovar Choleraesuis str; identical to SEQ ID NO: 14037
  CDS (1)..(1251): transl_table=11

SEQ ID NO: 69689 - protein, 416 aa, Salmonella enterica subsp. enterica serovar Choleraesuis str; identical to SEQ ID NO: 14038

SEQ ID NO: 69690 - DNA, 1224 bp, Pseudomonas syringae pv. syringae B728a; identical to SEQ ID NO: 14039
  CDS (1)..(1224)

SEQ ID NO: 69691 - protein, 407 aa, Pseudomonas syringae pv. syringae B728a; identical to SEQ ID NO: 14040

SEQ ID NO: 69692 - DNA, 1326 bp, Corynebacterium jeikeium K411; identical to SEQ ID NO: 14041
  CDS (1)..(1326): transl_table=11

SEQ ID NO: 69693 - protein, 441 aa, Corynebacterium jeikeium K411; identical to SEQ ID NO: 14042

SEQ ID NO: 69694 - DNA, 1293 bp, Rhodobacter sphaeroides 2.4.1; identical to SEQ ID NO: 14043
  CDS (1)..(1293)

SEQ ID NO: 69695 - protein, 430 aa, Rhodobacter sphaeroides 2.4.1; identical to SEQ ID NO: 14044

SEQ ID NO: 69696 - DNA, 1134 bp, Xylella fastidiosa Ann-1; identical to SEQ ID NO: 14045
  CDS (1)..(1134)

SEQ ID NO: 69697 - protein, 377 aa, Xylella fastidiosa Ann-1; identical to SEQ ID NO: 14046

SEQ ID NO: 69698 - DNA, 1464 bp, Leuconostoc mesenteroides subsp. mesenteroides ATCC 8293; identical to SEQ ID NO: 14047
  CDS (1)..(1464)

SEQ ID NO: 69699 - protein, 487 aa, Leuconostoc mesenteroides subsp. mesenteroides ATCC 8293; identical to SEQ ID NO: 14048

SEQ ID NO: 69700 - DNA, 1242 bp, Psychrobacter sp. 273-4; identical to SEQ ID NO: 14049
  CDS (1)..(1242)

SEQ ID NO: 69701 - protein, 413 aa, Psychrobacter sp. 273-4; identical to SEQ ID NO: 14050

SEQ ID NO: 69702 - DNA, 1179 bp, Ralstonia eutropha JMP134; identical to SEQ ID NO: 14051
  CDS (1)..(1179)

SEQ ID NO: 69703 - protein, 392 aa, Ralstonia eutropha JMP134; identical to SEQ ID NO: 14052

SEQ ID NO: 69704 - DNA, 1200 bp, Burkholderia cepacia R18194; identical to SEQ ID NO: 14053
  CDS (1)..(1200)

SEQ ID NO: 69705 - protein, 399 aa, Burkholderia cepacia R18194; identical to SEQ ID NO: 14054

SEQ ID NO: 69706 - DNA, 1224 bp, Pseudomonas fluorescens PfO-1; identical to SEQ ID NO: 14055
  CDS (1)..(1224)

SEQ ID NO: 69707 - protein, 407 aa, Pseudomonas fluorescens PfO-1; identical to SEQ ID NO: 14056

SEQ ID NO: 69708 - DNA, 1197 bp, Burkholderia fungorum LB400; identical to SEQ ID NO: 14057
  CDS (1)..(1197)

SEQ ID NO: 69709 - protein, 398 aa, Burkholderia fungorum LB400; identical to SEQ ID NO: 14058

SEQ ID NO: 69710 - DNA, 1428 bp, Oenococcus oeni PSU-1; identical to SEQ ID NO: 14059
  CDS (1)..(1428)

SEQ ID NO: 69711 - protein, 475 aa, Oenococcus oeni PSU-1; identical to SEQ ID NO: 14060

SEQ ID NO: 69712 - DNA, 1380 bp, Trichodesmium erythraeum IMS101; identical to SEQ ID NO: 14061
  CDS (1)..(1380)

SEQ ID NO: 69713 - protein, 459 aa, Trichodesmium erythraeum IMS101; identical to SEQ ID NO: 14062

SEQ ID NO: 69714 - DNA, 1434 bp, Campylobacter upsaliensis RM3195; identical to SEQ ID NO: 14063
  CDS (1)..(1434): transl_table=11

SEQ ID NO: 69715 - protein, 477 aa, Campylobacter upsaliensis RM3195; identical to SEQ ID NO: 14064

SEQ ID NO: 69716 - DNA, 1488 bp, Lactococcus lactis subsp. cremoris SK11; identical to SEQ ID NO: 14065
  CDS (1)..(1488)

SEQ ID NO: 69717 - protein, 495 aa, Lactococcus lactis subsp. cremoris SK11; identical to SEQ ID NO: 14066

SEQ ID NO: 69718 - DNA, 1461 bp, Deinococcus geothermalis DSM 11300; identical to SEQ ID NO: 14067
  CDS (1)..(1461): transl_table=11

SEQ ID NO: 69719 - protein, 486 aa, Deinococcus geothermalis DSM 11300; identical to SEQ ID NO: 14068

SEQ ID NO: 69720 - DNA, 1359 bp, Azotobacter vinelandii AvOP; identical to SEQ ID NO: 14069
  CDS (1)..(1359): transl_table=11

SEQ ID NO: 69721 - protein, 452 aa, Azotobacter vinelandii AvOP; identical to SEQ ID NO: 14070

SEQ ID NO: 69722 - DNA, 1356 bp, Burkholderia vietnamiensis G4; identical to SEQ ID NO: 14071
  CDS (1)..(1356): transl_table=11

SEQ ID NO: 69723 - protein, 451 aa, Burkholderia vietnamiensis G4; identical to SEQ ID NO: 14072

SEQ ID NO: 69724 - DNA, 1200 bp, Burkholderia mallei 10229; identical to SEQ ID NO: 14073
  CDS (1)..(1200)

SEQ ID NO: 69725 - protein, 399 aa, Burkholderia mallei 10229; identical to SEQ ID NO: 14074

SEQ ID NO: 69726 - DNA, 1200 bp, Burkholderia cenocepacia AU 1054; identical to SEQ ID NO: 14075
  CDS (1)..(1200): transl_table=11

SEQ ID NO: 69727 - protein, 399 aa, Burkholderia cenocepacia AU 1054; identical to SEQ ID NO: 14076

SEQ ID NO: 69728 - DNA, 1356 bp, Burkholderia pseudomallei 1655; identical to SEQ ID NO: 14077
  CDS (1)..(1356)

SEQ ID NO: 69729 - protein, 451 aa, Burkholderia pseudomallei 1655; identical to SEQ ID NO: 14078

SEQ ID NO: 69730 - DNA, 1173 bp, Chromohalobacter salexigens DSM 3043; identical to SEQ ID NO: 14079
  CDS (1)..(1173): transl_table=11

SEQ ID NO: 69731 - protein, 390 aa, Chromohalobacter salexigens DSM 3043; identical to SEQ ID NO: 14080

SEQ ID NO: 69732 - DNA, 1356 bp, Burkholderia pseudomallei 668; identical to SEQ ID NO: 14081
  CDS (1)..(1356)

SEQ ID NO: 69733 - protein, 451 aa, Burkholderia pseudomallei 668; identical to SEQ ID NO: 14082

SEQ ID NO: 69734 - DNA, 1269 bp, Polaromonas sp. JS666; identical to SEQ ID NO: 14083
  CDS (1)..(1269): transl_table=11

SEQ ID NO: 69735 - protein, 422 aa, Polaromonas sp. JS666; identical to SEQ ID NO: 14084

SEQ ID NO: 69736 - DNA, 1341 bp, Crocosphaera watsonii WH 8501; identical to SEQ ID NO: 14085
  CDS (1)..(1341): transl_table=11

SEQ ID NO: 69737 - protein, 446 aa, Crocosphaera watsonii WH 8501; identical to SEQ ID NO: 14086

SEQ ID NO: 69738 - DNA, 1431 bp, Geobacter metallireducens GS-15; identical to SEQ ID NO: 14087
  CDS (1)..(1431): transl_table=11

SEQ ID NO: 69739 - protein, 476 aa, Geobacter metallireducens GS-15; identical to SEQ ID NO: 14088

SEQ ID NO: 69740 - DNA, 1206 bp, Methanosarcina barkeri str. fusaro; identical to SEQ ID NO: 14089
  CDS (1)..(1206): transl_table=11

SEQ ID NO: 69741 - protein, 401 aa, Methanosarcina barkeri str. fusaro; identical to SEQ ID NO: 14090

SEQ ID NO: 69742 - DNA, 1206 bp, Desulfuromonas acetoxidans DSM 684; identical to SEQ ID NO: 14091
  CDS (1)..(1206): transl_table=11

SEQ ID NO: 69743 - protein, 401 aa, Desulfuromonas acetoxidans DSM 684; identical to SEQ ID NO: 14092

SEQ ID NO: 69744 - DNA, 1293 bp, Jannaschia sp. CCS1; identical to SEQ ID NO: 14093
  CDS (1)..(1293): transl_table=11

SEQ ID NO: 69745 - protein, 430 aa, Jannaschia sp. CCS1; identical to SEQ ID NO: 14094

SEQ ID NO: 69746 - DNA, 1458 bp, Desulfitobacterium hafniense DCB-2; identical to SEQ ID NO: 14095
  CDS (1)..(1458): transl_table=11

SEQ ID NO: 69747 - protein, 485 aa, Desulfitobacterium hafniense DCB-2; identical to SEQ ID NO: 14096

SEQ ID NO: 69748 - DNA, 1218 bp, Methanococcoides burtonii DSM 6242; identical to SEQ ID NO: 14097
  CDS (1)..(1218): transl_table=11

SEQ ID NO: 69749 - protein, 405 aa, Methanococcoides burtonii DSM 6242; identical to SEQ ID NO: 14098

SEQ ID NO: 69750 - DNA, 1575 bp, Frankia sp. EAN1pec; identical to SEQ ID NO: 14099
  CDS (1)..(1575): transl_table=11

SEQ ID NO: 69751 - protein, 524 aa, Frankia sp. EAN1pec; identical to SEQ ID NO: 14100

SEQ ID NO: 69752 - DNA, 1200 bp, Ralstonia metallidurans CH34; identical to SEQ ID NO: 14101
  CDS (1)..(1200): transl_table=11

SEQ ID NO: 69753 - protein, 399 aa, Ralstonia metallidurans CH34; identical to SEQ ID NO: 14102

SEQ ID NO: 69754 - DNA, 1341 bp, Magnetococcus sp. MC-1; identical to SEQ ID NO: 14103
  CDS (1)..(1341): transl_table=11

SEQ ID NO: 69755 - protein, 446 aa, Magnetococcus sp. MC-1; identical to SEQ ID NO: 14104

SEQ ID NO: 69756 - DNA, 1305 bp, Mesorhizobium sp. BNC1; identical to SEQ ID NO: 14105
  CDS (1)..(1305): transl_table=11

SEQ ID NO: 69757 - protein, 434 aa, Mesorhizobium sp. BNC1; identical to SEQ ID NO: 14106

SEQ ID NO: 69758 - DNA, 1290 bp, Silicibacter sp. TM1040; identical to SEQ ID NO: 14107
  CDS (1)..(1290): transl_table=11

SEQ ID NO: 69759 - protein, 429 aa, Silicibacter sp. TM1040; identical to SEQ ID NO: 14108

SEQ ID NO: 69760 - DNA, 1305 bp, Nitrobacter hamburgensis X14; identical to SEQ ID NO: 14109
  CDS (1)..(1305): transl_table=11

SEQ ID NO: 69761 - protein, 434 aa, Nitrobacter hamburgensis X14; identical to SEQ ID NO: 14110

SEQ ID NO: 69762 - DNA, 1308 bp, Paracoccus denitrificans PD1222; identical to SEQ ID NO: 14111
  CDS (1)..(1308): transl_table=11

SEQ ID NO: 69763 - protein, 435 aa, Paracoccus denitrificans PD1222; identical to SEQ ID NO: 14112

SEQ ID NO: 69764 - DNA, 1230 bp, Pseudomonas fluorescens; identical to SEQ ID NO: 14113
  CDS (1)..(1230): transl_table=11

SEQ ID NO: 69765 - protein, 409 aa, Pseudomonas fluorescens; identical to SEQ ID NO: 14114

SEQ ID NO: 69766 - DNA, 1215 bp, Pseudomonas fluorescens; identical to SEQ ID NO: 14115
  CDS (1)..(1215): transl_table=11

SEQ ID NO: 69767 - protein, 404 aa, Pseudomonas fluorescens; identical to SEQ ID NO: 14116

SEQ ID NO: 69768 - DNA, 1443 bp, Staphylococcus haemolyticus; identical to SEQ ID NO: 14117
  CDS (1)..(1443): transl_table=11

SEQ ID NO: 69769 - protein, 480 aa, Staphylococcus haemolyticus; identical to SEQ ID NO: 14118

SEQ ID NO: 69770 - DNA, 1245 bp, Leishmania major; identical to SEQ ID NO: 14119
  CDS (1)..(1245)

SEQ ID NO: 69771 - protein, 414 aa, Leishmania major; identical to SEQ ID NO: 14120

SEQ ID NO: 69772 - DNA, 1380 bp, Gibberella moniliformis; identical to SEQ ID NO: 14121
  CDS (1)..(1380)

SEQ ID NO: 69773 - protein, 459 aa, Gibberella moniliformis; identical to SEQ ID NO: 14122

SEQ ID NO: 69774 - DNA, 1233 bp, Schizosaccharomyces pombe; identical to SEQ ID NO: 14123
  CDS (1)..(1233)

SEQ ID NO: 69775 - protein, 410 aa, Schizosaccharomyces pombe; identical to SEQ ID NO: 14124

SEQ ID NO: 69776 - DNA, 1290 bp, Saccharomyces cerevisiae; identical to SEQ ID NO: 14125
  CDS (1)..(1290)

SEQ ID NO: 69777 - protein, 429 aa, Saccharomyces cerevisiae; identical to SEQ ID NO: 14126

SEQ ID NO: 69778 - DNA, 1200 bp, Pseudomonas aeruginosa; identical to SEQ ID NO: 14127
  CDS (1)..(1200): transl_table=11

SEQ ID NO: 69779 - protein, 399 aa, Pseudomonas aeruginosa; identical to SEQ ID NO: 14128

SEQ ID NO: 69780 - DNA, 1197 bp, Pseudomonas aeruginosa; identical to SEQ ID NO: 14129
  CDS (1)..(1197): transl_table=11

SEQ ID NO: 69781 - protein, 398 aa, Pseudomonas aeruginosa; identical to SEQ ID NO: 14130

SEQ ID NO: 69782 - DNA, 1224 bp, Acinetobacter sp; identical to SEQ ID NO: 14131
  CDS (1)..(1224): transl_table=11

SEQ ID NO: 69783 - protein, 407 aa, Acinetobacter sp; identical to SEQ ID NO: 14132

SEQ ID NO: 69784 - DNA, 1218 bp, Bordetella pertussis; identical to SEQ ID NO: 14133
  CDS (1)..(1218): transl_table=11

SEQ ID NO: 69785 - protein, 405 aa, Bordetella pertussis; identical to SEQ ID NO: 14134

SEQ ID NO: 69786 - DNA, 1305 bp, Brucella melitensis; identical to SEQ ID NO: 14135
  CDS (1)..(1305): transl_table=11

SEQ ID NO: 69787 - protein, 434 aa, Brucella melitensis; identical to SEQ ID NO: 14136

SEQ ID NO: 69788 - DNA, 1305 bp, Brucella suis; identical to SEQ ID NO: 14137
  CDS (1)..(1305)

SEQ ID NO: 69789 - protein, 434 aa, Brucella suis; identical to SEQ ID NO: 14138

SEQ ID NO: 69790 - DNA, 1200 bp, Buchnera aphidicola; identical to SEQ ID NO: 14139
  CDS (1)..(1200): transl_table=11

SEQ ID NO: 69791 - protein, 399 aa, Buchnera aphidicola; identical to SEQ ID NO: 14140

SEQ ID NO: 69792 - DNA, 1197 bp, Buchnera aphidicola; identical to SEQ ID NO: 14141
  CDS (1)..(1197): transl_table=11

SEQ ID NO: 69793 - protein, 398 aa, Buchnera aphidicola; identical to SEQ ID NO: 14142

SEQ ID NO: 69794 - DNA, 1200 bp, Burkholderia mallei; identical to SEQ ID NO: 14143
  CDS (1)..(1200): transl_table=11

SEQ ID NO: 69795 - protein, 399 aa, Burkholderia mallei; identical to SEQ ID NO: 14144

SEQ ID NO: 69796 - DNA, 1209 bp, Chromobacterium violaceum; identical to SEQ ID NO: 14145
  CDS (1)..(1209): transl_table=11

SEQ ID NO: 69797 - protein, 402 aa, Chromobacterium violaceum; identical to SEQ ID NO: 14146

SEQ ID NO: 69798 - DNA, 1206 bp, Erwinia carotovora; identical to SEQ ID NO: 14147
  CDS (1)..(1206): transl_table=11

SEQ ID NO: 69799 - protein, 401 aa, Erwinia carotovora; identical to SEQ ID NO: 14148

SEQ ID NO: 69800 - DNA, 1215 bp, Methanosarcina acetivorans; identical to SEQ ID NO: 14149
  CDS (1)..(1215): transl_table=11

SEQ ID NO: 69801 - protein, 404 aa, Methanosarcina acetivorans; identical to SEQ ID NO: 14150

SEQ ID NO: 69802 - DNA, 1209 bp, Neisseria gonorrhoeae; identical to SEQ ID NO: 14151
  CDS (1)..(1209)

SEQ ID NO: 69803 - protein, 402 aa, Neisseria gonorrhoeae; identical to SEQ ID NO: 14152

SEQ ID NO: 69804 - DNA, 1209 bp, Neisseria meningitidis; identical to SEQ ID NO: 14153
  CDS (1)..(1209)

SEQ ID NO: 69805 - protein, 402 aa, Neisseria meningitidis; identical to SEQ ID NO: 14154

SEQ ID NO: 69806 - DNA, 1209 bp, Neisseria meningitidis; identical to SEQ ID NO: 14155
  CDS (1)..(1209): transl_table=11

SEQ ID NO: 69807 - protein, 402 aa, Neisseria meningitidis; identical to SEQ ID NO: 14156

SEQ ID NO: 69808 - DNA, 1215 bp, Photorhabdus luminescens; identical to SEQ ID NO: 14157
  CDS (1)..(1215): transl_table=11

SEQ ID NO: 69809 - protein, 404 aa, Photorhabdus luminescens; identical to SEQ ID NO: 14158

SEQ ID NO: 69810 - DNA, 1218 bp, Photobacterium profundum; identical to SEQ ID NO: 14159
  CDS (1)..(1218): transl_table=11

SEQ ID NO: 69811 - protein, 405 aa, Photobacterium profundum; identical to SEQ ID NO: 14160

SEQ ID NO: 69812 - DNA, 1170 bp, Ralstonia solanacearum; identical to SEQ ID NO: 14161
  CDS (1)..(1170)

SEQ ID NO: 69813 - protein, 389 aa, Ralstonia solanacearum; identical to SEQ ID NO: 14162

SEQ ID NO: 69814 - DNA, 1305 bp, Rhizobium loti; identical to SEQ ID NO: 14163
  CDS (1)..(1305): transl_table=11

SEQ ID NO: 69815 - protein, 434 aa, Rhizobium loti; identical to SEQ ID NO: 14164

SEQ ID NO: 69816 - DNA, 1305 bp, Rhizobium meliloti; identical to SEQ ID NO: 14165
  CDS (1)..(1305): transl_table=11

SEQ ID NO: 69817 - protein, 434 aa, Rhizobium meliloti; identical to SEQ ID NO: 14166

SEQ ID NO: 69818 - DNA, 1203 bp, Salmonella choleraesuis; identical to SEQ ID NO: 14167
  CDS (1)..(1203)

SEQ ID NO: 69819 - protein, 400 aa, Salmonella choleraesuis; identical to SEQ ID NO: 14168

SEQ ID NO: 69820 - DNA, 1203 bp, Salmonella paratyphi; identical to SEQ ID NO: 14169
  CDS (1)..(1203): transl_table=11

SEQ ID NO: 69821 - protein, 400 aa, Salmonella paratyphi; identical to SEQ ID NO: 14170

SEQ ID NO: 69822 - DNA, 1308 bp, Vibrio cholerae; identical to SEQ ID NO: 14171
  CDS (1)..(1308): transl_table=11

SEQ ID NO: 69823 - protein, 435 aa, Vibrio cholerae; identical to SEQ ID NO: 14172

SEQ ID NO: 69824 - DNA, 1311 bp, Vibrio parahaemolyticus; identical to SEQ ID NO: 14173
  CDS (1)..(1311): transl_table=11

SEQ ID NO: 69825 - protein, 436 aa, Vibrio parahaemolyticus; identical to SEQ ID NO: 14174

SEQ ID NO: 69826 - DNA, 1314 bp, Vibrio vulnificus; identical to SEQ ID NO: 14175
  CDS (1)..(1314): transl_table=11

SEQ ID NO: 69827 - protein, 437 aa, Vibrio vulnificus; identical to SEQ ID NO: 14176

SEQ ID NO: 69828 - DNA, 1314 bp, Vibrio vulnificus; identical to SEQ ID NO: 14177
  CDS (1)..(1314): transl_table=11

SEQ ID NO: 69829 - protein, 437 aa, Vibrio vulnificus; identical to SEQ ID NO: 14178

SEQ ID NO: 69830 - DNA, 1179 bp, Xanthomonas axonopodis; identical to SEQ ID NO: 14179
  CDS (1)..(1179): transl_table=11

SEQ ID NO: 69831 - protein, 392 aa, Xanthomonas axonopodis; identical to SEQ ID NO: 14180

SEQ ID NO: 69832 - DNA, 1197 bp, Xanthomonas campestris; identical to SEQ ID NO: 14181
  CDS (1)..(1197): transl_table=11

SEQ ID NO: 69833 - protein, 398 aa, Xanthomonas campestris; identical to SEQ ID NO: 14182

SEQ ID NO: 69834 - DNA, 1185 bp, Xylella fastidiosa; identical to SEQ ID NO: 14183
  CDS (1)..(1185): transl_table=11

SEQ ID NO: 69835 - protein, 394 aa, Xylella fastidiosa; identical to SEQ ID NO: 14184

SEQ ID NO: 69836 - DNA, 1185 bp, Xylella fastidiosa; identical to SEQ ID NO: 14185
  CDS (1)..(1185): transl_table=11

SEQ ID NO: 69837 - protein, 394 aa, Xylella fastidiosa; identical to SEQ ID NO: 14186

SEQ ID NO: 69838 - DNA, 24 bp, Artificial sequence
  Primer sequence
atgacacaattcgcttctcctgtt

SEQ ID NO: 69839 - DNA, 26 bp, Artificial sequence
  Primer sequence
ttaactggcttttttaatatgcggaa

SEQ ID NO: 69840 - protein, 581 aa, Artificial sequence; identical to SEQ ID NO: 14189
  Consensus
  Variant (3)..(3): Xaa in position 3 is any amino acid
  Variant (20)..(22): Xaa in position 20 to 22 is any amino acid
  Variant (23)..(24): Xaa in position 23 to 24 is any or no amino acid
  Variant (27)..(29): Xaa in position 27 to 29 is any amino acid
  Variant (31)..(31): Xaa in position 31 is any amino acid
  Variant (33)..(33): Xaa in position 33 is any amino acid
  Variant (35)..(36): Xaa in position 35 to 36 is any amino acid
  Variant (38)..(42): Xaa in position 38 to 42 is any amino acid
  Variant (43)..(53): Xaa in position 43 to 53 is any or no amino acid
  Variant (56)..(57): Xaa in position 56 to 57 is any amino acid
  Variant (60)..(60): Xaa in position 60 is any amino acid
  Variant (62)..(63): Xaa in position 62 to 63 is any amino acid
  Variant (68)..(68): Xaa in position 68 is any amino acid
  Variant (72)..(72): Xaa in position 72 is any amino acid
  Variant (75)..(76): Xaa in position 75 to 76 is any amino acid
  Variant (78)..(78): Xaa in position 78 is any amino acid
  Variant (80)..(88): Xaa in position 80 to 88 is any or no amino acid
  Variant (95)..(96): Xaa in position 95 to 96 is any amino acid
  Variant (100)..(103): Xaa in position 100 to 103 is any amino acid
  Variant (105)..(105): Xaa in position 105 is any amino acid
  Variant (107)..(109): Xaa in position 107 to 109 is any amino acid
  Variant (110)..(126): Xaa in position 110 to 126 is any or no amino acid
  Variant (128)..(128): Xaa in position 128 is any or no amino acid
  Variant (130)..(130): Xaa in position 130 is any or no amino acid
  Variant (132)..(132): Xaa in position 132 is any or no amino acid
  Variant (134)..(134): Xaa in position 134 is any or no amino acid
  Variant (136)..(137): Xaa in position 136 to 137 is any amino acid
  Variant (138)..(138): Xaa in position 138 is any or no amino acid
  Variant (153)..(154): Xaa in position 153 to 154 is any amino acid
  Variant (156)..(156): Xaa in position 156 is any amino acid
  Variant (158)..(161): Xaa in position 158 to 161 is any amino acid
  Variant (162)..(162): Xaa in position 162 is any or no amino acid
  Variant (164)..(172): Xaa in position 164 to 172 is any amino acid
  Variant (174)..(176): Xaa in position 174 to 176 is any amino acid
  Variant (178)..(183): Xaa in position 178 to 183 is any amino acid
  Variant (184)..(198): Xaa in position 184 to 198 is any or no amino acid
  Variant (208)..(208): Xaa in position 208 is any amino acid
  Variant (210)..(212): Xaa in position 210 to 212 is any amino acid
  Variant (214)..(215): Xaa in position 214 to 215 is any amino acid
  Variant (218)..(218): Xaa in position 218 is any amino acid
  Variant (221)..(222): Xaa in position 221 to 222 is any amino acid
  Variant (224)..(224): Xaa in position 224 is any amino acid
  Variant (225)..(236): Xaa in position 225 to 236 is any or no amino acid
  Variant (238)..(238): Xaa in position 238 is any or no amino acid
  Variant (244)..(245): Xaa in position 244 to 245 is any amino acid
  Variant (250)..(250): Xaa in position 250 is any amino acid
  Variant (252)..(252): Xaa in position 252 is any amino acid
  Variant (263)..(263): Xaa in position 263 is any amino acid
  Variant (265)..(266): Xaa in position 265 to 266 is any amino acid
  Variant (269)..(270): Xaa in position 269 to 270 is any amino acid
  Variant (271)..(288): Xaa in position 271 to 288 is any or no amino acid
  Variant (290)..(291): Xaa in position 290 to 291 is any amino acid
  Variant (294)..(295): Xaa in position 294 to 295 is any amino acid
  Variant (298)..(299): Xaa in position 298 to 299 is any amino acid
  Variant (302)..(303): Xaa in position 302 to 303 is any amino acid
  Variant (305)..(305): Xaa in position 305 is any amino acid
  Variant (306)..(316): Xaa in position 306 to 316 is any or no amino acid
  Variant (318)..(318): Xaa in position 318 is any amino acid
  Variant (326)..(329): Xaa in position 326 to 329 is any amino acid
  Variant (334)..(334): Xaa in position 334 is any amino acid
  Variant (337)..(337): Xaa in position 337 is any amino acid
  Variant (338)..(391): Xaa in position 338 to 391 is any or no amino acid
  Variant (394)..(394): Xaa in position 394 is any amino acid
  Variant (397)..(397): Xaa in position 397 is any amino acid
  Variant (401)..(401): Xaa in position 401 is any amino acid
  Variant (407)..(408): Xaa in position 407 to 408 is any amino acid
  Variant (416)..(416): Xaa in position 416 is any amino acid
  Variant (418)..(418): Xaa in position 418 is any amino acid
  Variant (419)..(427): Xaa in position 419 to 427 is any or no amino acid
  Variant (430)..(430): Xaa in position 430 is any amino acid
  Variant (433)..(442): Xaa in position 433 to 442 is any or no amino acid
  Variant (453)..(453): Xaa in position 453 is any amino acid
  Variant (455)..(455): Xaa in position 455 is any amino acid
  Variant (457)..(457): Xaa in position 457 is any amino acid
  Variant (459)..(459): Xaa in position 459 is any amino acid
  Variant (461)..(466): Xaa in position 461 to 466 is any amino acid
  Variant (468)..(474): Xaa in position 468 to 474 is any or no amino acid
  Variant (484)..(484): Xaa in position 484 is any amino acid
  Variant (489)..(491): Xaa in position 489 to 491 is any amino acid
  Variant (492)..(531): Xaa in position 492 to 531 is any or no amino acid
  Variant (541)..(542): Xaa in position 541 to 542 is any amino acid
  Variant (545)..(545): Xaa in position 545 is any amino acid
  Variant (553)..(553): Xaa in position 553 is any amino acid
  Variant (557)..(557): Xaa in position 557 is any amino acid
  Variant (559)..(560): Xaa in position 559 to 560 is any amino acid
  Variant (561)..(575): Xaa in position 561 to 575 is any or no amino acid
  Variant (578)..(579): Xaa in position 578 to 579 is any amino acid

SEQ ID NO: 69841 - protein, 10 aa, Artificial sequence
  Consensus
  Variant (2)..(2): Xaa in position 2 is any amino acid
  Variant (3)..(3): Xaa in position 3 is Asn or Thr
  Variant (5)..(5): Xaa in position 5 is any amino acid
  Variant (7)..(7): Xaa in position 7 is any amino acid
  Variant (8)..(8): Xaa in position 8 is Phe, Ile, Leu or Val
  Variant (9)..(9): Xaa in position 9 is any amino acid
LXXDXYXXXM

SEQ ID NO: 69842 - protein, 25 aa, Artificial sequence
  Consensus
  Variant (2)..(4): Xaa in position 2 to 4 is any or no amino acid
  Variant (8)..(10): Xaa in position 8 to 10 is any amino acid
  Variant (11)..(11): Xaa in position 11 is Ala or Gly
  Variant (12)..(14): Xaa in position 12 to 14 is any amino acid
  Variant (15)..(15): Xaa in position 15 is Ala, Asp, Glu, Gly, Asn, Gln or Ser
  Variant (16)..(19): Xaa in position 16 to 19 is any amino acid
  Variant (22)..(22): Xaa in position 22 is any amino acid
  Variant (25)..(25): Xaa in position 25 is Ala, Glu, Gln or Ser
GXXXTSNXXXXXXXXXXXXGTXAHX

SEQ ID NO: 69843 - DNA, 819 bp, Escherichia coli; identical to SEQ ID NO: 46342
  CDS (1)..(819)

SEQ ID NO: 69844 - protein, 272 aa, Escherichia coli; identical to SEQ ID NO: 46343

SEQ ID NO: 69845 - DNA, 774 bp, Thermoplasma volcanium GSS1; identical to SEQ ID NO: 46344
  CDS (1)..(774): transl_table=11

SEQ ID NO: 69846 - protein, 257 aa, Thermoplasma volcanium GSS1; identical to SEQ ID NO: 46345

SEQ ID NO: 69847 - DNA, 870 bp, Vibrio cholerae O1 biovar eltor str. N16961; identical to SEQ ID NO: 46346
  CDS (1)..(870): transl_table=11

SEQ ID NO: 69848 - protein, 289 aa, Vibrio cholerae O1 biovar eltor str. N16961; identical to SEQ ID NO: 46347

SEQ ID NO: 69849 - DNA, 867 bp, Pseudomonas aeruginosa PAO1; identical to SEQ ID NO: 46348
  CDS (1)..(867): transl_table=11

SEQ ID NO: 69850 - protein, 288 aa, Pseudomonas aeruginosa PAO1; identical to SEQ ID NO: 46349

SEQ ID NO: 69851 - DNA, 798 bp, Deinococcus radiodurans R1; identical to SEQ ID NO: 46350
  CDS (1)..(798): transl_table=11

SEQ ID NO: 69852 - protein, 265 aa, Deinococcus radiodurans R1; identical to SEQ ID NO: 46351

SEQ ID NO: 69853 - DNA, 723 bp, Thermoplasma acidophilum DSM 1728; identical to SEQ ID NO: 46352
  CDS (1)..(723): transl_table=11

SEQ ID NO: 69854 - protein, 240 aa, Thermoplasma acidophilum DSM 1728; identical to SEQ ID NO: 46353

SEQ ID NO: 69855 - DNA, 843 bp, Listeria monocytogenes EGD-e; identical to SEQ ID NO: 46354
  CDS (1)..(843): transl_table=11

SEQ ID NO: 69856 - protein, 280 aa, Listeria monocytogenes EGD-e; identical to SEQ ID NO: 46355

SEQ ID NO: 69857 - DNA, 846 bp, Listeria innocua Clip11262; identical to SEQ ID NO: 46356
  CDS (1)..(846): transl_table=11

SEQ ID NO: 69858 - protein, 281 aa, Listeria innocua Clip11262; identical to SEQ ID NO: 46357

SEQ ID NO: 69859 - DNA, 855 bp, Nostoc sp. PCC 7120; identical to SEQ ID NO: 46358
  CDS (1)..(855): transl_table=11

SEQ ID NO: 69860 - protein, 284 aa, Nostoc sp. PCC 7120; identical to SEQ ID NO: 46359

SEQ ID NO: 69861 - DNA, 771 bp, Agrobacterium tumefaciens str. C58; identical to SEQ ID NO: 46360
  CDS (1)..(771): transl_table=11

SEQ ID NO: 69862 - protein, 256 aa, Agrobacterium tumefaciens str. C58; identical to SEQ ID NO: 46361

SEQ ID NO: 69863 - DNA, 741 bp, Thermoanaerobacter tengcongensis MB4; identical to SEQ ID NO: 46362
  CDS (1)..(741): transl_table=11

SEQ ID NO: 69864 - protein, 246 aa, Thermoanaerobacter tengcongensis MB4; identical to SEQ ID NO: 46363

SEQ ID NO: 69865 - DNA, 768 bp, Streptomyces coelicolor A3(2); identical to SEQ ID NO: 46364
  CDS (1)..(768): transl_table=11

SEQ ID NO: 69866 - protein, 255 aa, Streptomyces coelicolor A3(2); identical to SEQ ID NO: 46365

SEQ ID NO: 69867 - DNA, 771 bp, Xanthomonas axonopodis pv. citri str. 306; identical to SEQ ID NO: 46366
  CDS (1)..(771): transl_table=11

SEQ ID NO: 69868 - protein, 256 aa, Xanthomonas axonopodis pv. citri str. 306; identical to SEQ ID NO: 46367

SEQ ID NO: 69869 - DNA, 909 bp, Xanthomonas axonopodis pv. citri str. 306; identical to SEQ ID NO: 46368
  CDS (1)..(909): transl_table=11

SEQ ID NO: 69870 - protein, 302 aa, Xanthomonas axonopodis pv. citri str. 306; identical to SEQ ID NO: 46369

SEQ ID NO: 69871 - DNA, 816 bp, Yersinia pestis KIM; identical to SEQ ID NO: 46370
  CDS (1)..(816): transl_table=11

SEQ ID NO: 69872 - protein, 271 aa, Yersinia pestis KIM; identical to SEQ ID NO: 46371

SEQ ID NO: 69873 - DNA, 870 bp, Pseudomonas putida KT2440; identical to SEQ ID NO: 46372
  CDS (1)..(870): transl_table=11

SEQ ID NO: 69874 - protein, 289 aa, Pseudomonas putida KT2440; identical to SEQ ID NO: 46373

SEQ ID NO: 69875 - DNA, 882 bp, Vibrio vulnificus CMCP6; identical to SEQ ID NO: 46374
  CDS (1)..(882): transl_table=11

SEQ ID NO: 69876 - protein, 293 aa, Vibrio vulnificus CMCP6; identical to SEQ ID NO: 46375

SEQ ID NO: 69877 - DNA, 765 bp, Bradyrhizobium japonicum USDA 110; identical to SEQ ID NO: 46376
  CDS (1)..(765): transl_table=11

SEQ ID NO: 69878 - protein, 254 aa, Bradyrhizobium japonicum USDA 110; identical to SEQ ID NO: 46377

SEQ ID NO: 69879 - DNA, 738 bp, Shewanella oneidensis MR-1; identical to SEQ ID NO: 46378
  CDS (1)..(738): transl_table=11

SEQ ID NO: 69880 - protein, 245 aa, Shewanella oneidensis MR-1; identical to SEQ ID NO: 46379

SEQ ID NO: 69881 - DNA, 843 bp, Lactobacillus plantarum WCFS1; identical to SEQ ID NO: 46380
  CDS (1)..(843): transl_table=11

SEQ ID NO: 69882 - protein, 280 aa, Lactobacillus plantarum WCFS1; identical to SEQ ID NO: 46381

SEQ ID NO: 69883 - DNA, 870 bp, Pseudomonas syringae pv. tomato str. DC3000; identical to SEQ ID NO: 46382
  CDS (1)..(870): transl_table=11

SEQ ID NO: 69884 - protein, 289 aa, Pseudomonas syringae pv. tomato str. DC3000; identical to SEQ ID NO: 46383

SEQ ID NO: 69885 - DNA, 870 bp, Vibrio parahaemolyticus RIMD 2210633; identical to SEQ ID NO: 46384
  CDS (1)..(870): transl_table=11

SEQ ID NO: 69886 - protein, 289 aa, Vibrio parahaemolyticus RIMD 2210633; identical to SEQ ID NO: 46385

SEQ ID NO: 69887 - DNA, 834 bp, Enterococcus faecalis V583; identical to SEQ ID NO: 46386
  CDS (1)..(834): transl_table=11

SEQ ID NO: 69888 - protein, 277 aa, Enterococcus faecalis V583; identical to SEQ ID NO: 46387

SEQ ID NO: 69889 - DNA, 765 bp, Streptomyces avermitilis MA-4680; identical to SEQ ID NO: 46388
  CDS (1)..(765): transl_table=11

SEQ ID NO: 69890 - protein, 254 aa, Streptomyces avermitilis MA-4680; identical to SEQ ID NO: 46389

SEQ ID NO: 69891 - DNA, 924 bp, Rhodopirellula baltica SH 1; identical to SEQ ID NO: 46390
  CDS (1)..(924): transl_table=11

SEQ ID NO: 69892 - protein, 307 aa, Rhodopirellula baltica SH 1; identical to SEQ ID NO: 46391

SEQ ID NO: 69893 - DNA, 876 bp, Gloeobacter violaceus PCC 7421; identical to SEQ ID NO: 46392
  CDS (1)..(876): transl_table=11

SEQ ID NO: 69894 - protein, 291 aa, Gloeobacter violaceus PCC 7421; identical to SEQ ID NO: 46393

SEQ ID NO: 69895 - DNA, 882 bp, Vibrio vulnificus YJ016; identical to SEQ ID NO: 46394
  CDS (1)..(882): transl_table=11

SEQ ID NO: 69896 - protein, 293 aa, Vibrio vulnificus YJ016; identical to SEQ ID NO: 46395

SEQ ID NO: 69897 - DNA, 726 bp, Mycobacterium avium subsp. paratuberculosis K-10; identical to SEQ ID NO: 46396
  CDS (1)..(726): transl_table=11

SEQ ID NO: 69898 - protein, 241 aa, Mycobacterium avium subsp. paratuberculosis K-10; identical to SEQ ID NO: 46397

SEQ ID NO: 69899 - DNA, 843 bp, Listeria monocytogenes str. 4b F2365; identical to SEQ ID NO: 46398
  CDS (1)..(843): transl_table=11

SEQ ID NO: 69900 - protein, 280 aa, Listeria monocytogenes str. 4b F2365; identical to SEQ ID NO: 46399

SEQ ID NO: 69901 - DNA, 816 bp, Yersinia pseudotuberculosis IP 32953; identical to SEQ ID NO: 46400
  CDS (1)..(816): transl_table=11

SEQ ID NO: 69902 - protein, 271 aa, Yersinia pseudotuberculosis IP 32953; identical to SEQ ID NO: 46401

SEQ ID NO: 69903 - DNA, 840 bp, Nocardia farcinica IFM 10152; identical to SEQ ID NO: 46402
  CDS (1)..(840): transl_table=11

SEQ ID NO: 69904 - protein, 279 aa, Nocardia farcinica IFM 10152; identical to SEQ ID NO: 46403

SEQ ID NO: 69905 - DNA, 906 bp, Nocardia farcinica IFM 10152; identical to SEQ ID NO: 46404
  CDS (1)..(906): transl_table=11

SEQ ID NO: 69906 - protein, 301 aa, Nocardia farcinica IFM 10152; identical to SEQ ID NO: 46405

SEQ ID NO: 69907 - DNA, 891 bp, Photobacterium profundum SS9; identical to SEQ ID NO: 46406
  CDS (1)..(891): transl_table=11

SEQ ID NO: 69908 - protein, 296 aa, Photobacterium profundum SS9; identical to SEQ ID NO: 46407

SEQ ID NO: 69909 - DNA, 819 bp, Salmonella enterica subsp. enterica serovar Paratyphi A str. ATCC; identical to SEQ ID NO: 46408
  CDS (1)..(819): transl_table=11

SEQ ID NO: 69910 - protein, 272 aa, Salmonella enterica subsp. enterica serovar Paratyphi A str. ATCC; identical to SEQ ID NO: 46409

SEQ ID NO: 69911 - DNA, 873 bp, Synechococcus elongatus PCC 6301; identical to SEQ ID NO: 46410
  CDS (1)..(873): transl_table=11

SEQ ID NO: 69912 - protein, 290 aa, Synechococcus elongatus PCC 6301; identical to SEQ ID NO: 46411

SEQ ID NO: 69913 - DNA, 852 bp, Bacillus clausii KSM-K16; identical to SEQ ID NO: 46412
  CDS (1)..(852): transl_table=11

SEQ ID NO: 69914 - protein, 283 aa, Bacillus clausii KSM-K16; identical to SEQ ID NO: 46413

SEQ ID NO: 69915 - DNA, 852 bp, Xanthomonas oryzae pv. oryzae KACC10331; identical to SEQ ID NO: 46414
  CDS (1)..(852): transl_table=11

SEQ ID NO: 69916 - protein, 283 aa, Xanthomonas oryzae pv. oryzae KACC10331; identical to SEQ ID NO: 46415

SEQ ID NO: 69917 - DNA, 864 bp, Pseudomonas syringae pv. syringae B728a; identical to SEQ ID NO: 46416
  CDS (1)..(864): transl_table=11

SEQ ID NO: 69918 - protein, 287 aa, Pseudomonas syringae pv. syringae B728a; identical to SEQ ID NO: 46417

SEQ ID NO: 69919 - DNA, 735 bp, Pseudomonas syringae pv. syringae B728a; identical to SEQ ID NO: 46418
  CDS (1)..(735): transl_table=11

SEQ ID NO: 69920 - protein, 244 aa, Pseudomonas syringae pv. syringae B728a; identical to SEQ ID NO: 46419

SEQ ID NO: 69921 - DNA, 792 bp, Xanthomonas campestris pv. campestris str. 8004; identical to SEQ ID NO: 46420
  CDS (1)..(792): transl_table=11

SEQ ID NO: 69922 - protein, 263 aa, Xanthomonas campestris pv. campestris str. 8004; identical to SEQ ID NO: 46421

SEQ ID NO: 69923 - DNA, 900 bp, Xanthomonas campestris pv. campestris str. 8004; identical to SEQ ID NO: 46422
  CDS (1)..(900): transl_table=11

SEQ ID NO: 69924 - protein, 299 aa, Xanthomonas campestris pv. campestris str. 8004; identical to SEQ ID NO: 46423

SEQ ID NO: 69925 - DNA, 858 bp, Pseudomonas fluorescens Pf-5; identical to SEQ ID NO: 46424
  CDS (1)..(858): transl_table=11

SEQ ID NO: 69926 - protein, 285 aa, Pseudomonas fluorescens Pf-5; identical to SEQ ID NO: 46425

SEQ ID NO: 69927 - DNA, 864 bp, Pseudomonas syringae pv. phaseolicola 1448A; identical to SEQ ID NO: 46426
  CDS (1)..(864): transl_table=11

SEQ ID NO: 69928 - protein, 287 aa, Pseudomonas syringae pv. phaseolicola 1448A; identical to SEQ ID NO: 46427

SEQ ID NO: 69929 - DNA, 930 bp, Ralstonia eutropha JMP134; identical to SEQ ID NO: 46428
  CDS (1)..(930): transl_table=11

SEQ ID NO: 69930 - protein, 309 aa, Ralstonia eutropha JMP134; identical to SEQ ID NO: 46429

SEQ ID NO: 69931 - DNA, 915 bp, Nostoc punctiforme PCC 73102; identical to SEQ ID NO: 46430
  CDS (1)..(915)

SEQ ID NO: 69932 - protein, 304 aa, Nostoc punctiforme PCC 73102; identical to SEQ ID NO: 46431

SEQ ID NO: 69933 - DNA, 729 bp, Nostoc punctiforme PCC 73102; identical to SEQ ID NO: 46432
  CDS (1)..(729)

SEQ ID NO: 69934 - protein, 242 aa, Nostoc punctiforme PCC 73102; identical to SEQ ID NO: 46433

SEQ ID NO: 69935 - DNA, 789 bp, Pseudomonas aeruginosa UCBPP-PA14; identical to SEQ ID NO: 46434
  CDS (1)..(789)

SEQ ID NO: 69936 - protein, 262 aa, Pseudomonas aeruginosa UCBPP-PA14; identical to SEQ ID NO: 46435

SEQ ID NO: 69937 - DNA, 861 bp, Pseudomonas fluorescens PfO-1; identical to SEQ ID NO: 46436
  CDS (1)..(861)

SEQ ID NO: 69938 - protein, 286 aa, Pseudomonas fluorescens PfO-1; identical to SEQ ID NO: 46437

SEQ ID NO: 69939 - DNA, 882 bp, Cytophaga hutchinsonii; identical to SEQ ID NO: 46438
  CDS (1)..(882)

SEQ ID NO: 69940 - protein, 293 aa, Cytophaga hutchinsonii; identical to SEQ ID NO: 46439

SEQ ID NO: 69941 - DNA, 849 bp, Pediococcus pentosaceus ATCC 25745; identical to SEQ ID NO: 46440
  CDS (1)..(849)

SEQ ID NO: 69942 - protein, 282 aa, Pediococcus pentosaceus ATCC 25745; identical to SEQ ID NO: 46441

SEQ ID NO: 69943 - DNA, 939 bp, Pseudomonas aeruginosa UCBPP-PA14; identical to SEQ ID NO: 46442
  CDS (1)..(939)

SEQ ID NO: 69944 - protein, 312 aa, Pseudomonas aeruginosa UCBPP-PA14; identical to SEQ ID NO: 46443

SEQ ID NO: 69945 - DNA, 855 bp, Azotobacter vinelandii AvOP; identical to SEQ ID NO: 46444
  CDS (1)..(855): transl_table=11

SEQ ID NO: 69946 - protein, 284 aa, Azotobacter vinelandii AvOP; identical to SEQ ID NO: 46445

SEQ ID NO: 69947 - DNA, 870 bp, Chromohalobacter salexigens DSM 3043; identical to SEQ ID NO: 46446
  CDS (1)..(870): transl_table=11

SEQ ID NO: 69948 - protein, 289 aa, Chromohalobacter salexigens DSM 3043; identical to SEQ ID NO: 46447

SEQ ID NO: 69949 - DNA, 852 bp, Frankia sp. CcI3; identical to SEQ ID NO: 46448
  CDS (1)..(852): transl_table=11

SEQ ID NO: 69950 - protein, 283 aa, Frankia sp. CcI3; identical to SEQ ID NO: 46449

SEQ ID NO: 69951 - DNA, 852 bp, Frankia sp. EAN1pec; identical to SEQ ID NO: 46450
  CDS (1)..(852): transl_table=11

SEQ ID NO: 69952 - protein, 283 aa, Frankia sp. EAN1pec; identical to SEQ ID NO: 46451

SEQ ID NO: 69953 - DNA, 954 bp, Shewanella baltica OS155; identical to SEQ ID NO: 46452
  CDS (1)..(954): transl_table=11

SEQ ID NO: 69954 - protein, 317 aa, Shewanella baltica OS155; identical to SEQ ID NO: 46453

SEQ ID NO: 69955 - DNA, 942 bp, Shewanella amazonensis SB2B; identical to SEQ ID NO: 46454
  CDS (1)..(942): transl_table=11

SEQ ID NO: 69956 - protein, 313 aa, Shewanella amazonensis SB2B; identical to SEQ ID NO: 46455

SEQ ID NO: 69957 - DNA, 729 bp, Rubrobacter xylanophilus DSM 9941; identical to SEQ ID NO: 46456
  CDS (1)..(729): transl_table=11

SEQ ID NO: 69958 - protein, 242 aa, Rubrobacter xylanophilus DSM 9941; identical to SEQ ID NO: 46457

SEQ ID NO: 69959 - DNA, 906 bp, Shewanella frigidimarina NCIMB 400; identical to SEQ ID NO: 46458
  CDS (1)..(906): transl_table=11

SEQ ID NO: 69960 - protein, 301 aa, Shewanella frigidimarina NCIMB 400; identical to SEQ ID NO: 46459

SEQ ID NO: 69961 - DNA, 849 bp, Pseudoalteromonas haloplanktis TAC125; identical to SEQ ID NO: 46460
  CDS (1)..(849): transl_table=11

SEQ ID NO: 69962 - protein, 282 aa, Pseudoalteromonas haloplanktis TAC125; identical to SEQ ID NO: 46461

SEQ ID NO: 69963 - DNA, 726 bp, uncultured Acidobacteria bacterium; identical to SEQ ID NO: 46462
  CDS (1)..(726)

SEQ ID NO: 69964 - protein, 241 aa, uncultured Acidobacteria bacterium; identical to SEQ ID NO: 46463

SEQ ID NO: 69965 - DNA, 24 bp, Artificial sequence
  Primer sequence
atgatttacatcggtctaccgcaa

SEQ ID NO: 69966 - DNA, 27 bp, Artificial sequence
  Primer sequence
ttagaaaagagaagattgctgtggaat

SEQ ID NO: 69967 - protein, 325 aa, Artificial sequence; identical to SEQ ID NO: 46466
  Consensus
  Variant (3)..(5): Xaa in position 3 to 5 is any amino acid
  Variant (7)..(18): Xaa in position 7 to 18 is any amino acid
  Variant (19)..(36): Xaa in position 19 to 36 is any or no amino acid
  Variant (38)..(39): Xaa in position 38 to 39 is any amino acid
  Variant (42)..(46): Xaa in position 42 to 46 is any amino acid
  Variant (49)..(49): Xaa in position 49 is any amino acid
  Variant (55)..(64): Xaa in position 55 to 64 is any amino acid
  Variant (65)..(65): Xaa in position 65 is any or no amino acid
  Variant (67)..(73): Xaa in position 67 to 73 is any amino acid
  Variant (75)..(75): Xaa in position 75 is any amino acid
  Variant (77)..(78): Xaa in position 77 to 78 is any amino acid
  Variant (80)..(83): Xaa in position 80 to 83 is any amino acid
  Variant (87)..(89): Xaa in position 87 to 89 is any amino acid
  Variant (91)..(99): Xaa in position 91 to 99 is any amino acid
  Variant (100)..(106): Xaa in position 100 to 106 is any or no amino acid
  Variant (108)..(113): Xaa in position 108 to 113 is any amino acid
  Variant (115)..(116): Xaa in position 115 to 116 is any amino acid
  Variant (117)..(122): Xaa in position 117 to 122 is any or no amino acid
  Variant (125)..(129): Xaa in position 125 to 129 is any amino acid
  Variant (133)..(155): Xaa in position 133 to 155 is any amino acid
  Variant (156)..(161): Xaa in position 156 to 161 is any or no amino acid
  Variant (164)..(164): Xaa in position 164 is any amino acid
  Variant (166)..(168): Xaa in position 166 to 168 is any amino acid
  Variant (171)..(175): Xaa in position 171 to 175 is any amino acid
  Variant (176)..(182): Xaa in position 176 to 182 is any or no amino acid
  Variant (184)..(193): Xaa in position 184 to 193 is any amino acid
  Variant (195)..(209): Xaa in position 195 to 209 is any amino acid
  Variant (210)..(233): Xaa in position 210 to 233 is any or no amino acid
  Variant (236)..(237): Xaa in position 236 to 237 is any amino acid
  Variant (239)..(254): Xaa in position 239 to 254 is any amino acid
  Variant (255)..(273): Xaa in position 255 to 273 is any or no amino acid
  Variant (275)..(282): Xaa in position 275 to 282 is any amino acid
  Variant (283)..(302): Xaa in position 283 to 302 is any or no amino acid
  Variant (304)..(313): Xaa in position 304 to 313 is any amino acid
  Variant (315)..(317): Xaa in position 315 to 317 is any amino acid
  Variant (319)..(324): Xaa in position 319 to 324 is any amino acid

SEQ ID NO: 69968 - protein, 18 aa, Artificial sequence
  Consensus
  Variant (2)..(4): Xaa in position 2 to 4 is any amino acid
  Variant (5)..(5): Xaa in position 5 is Ala, Cys, Gly, Ser, Thr or Val
  Variant (6)..(10): Xaa in position 6 to 10 is any amino acid
  Variant (13)..(13): Xaa in position 13 is Gly, Ile, Leu or Val
  Variant (14)..(14): Xaa in position 14 is Asp or Asn
  Variant (15)..(15): Xaa in position 15 is any amino acid
  Variant (16)..(16): Xaa in position 16 is Ala, Pro, Ser or Thr
LXXXXXXXXXVEXXXXFY

SEQ ID NO: 69969 - protein, 25 aa, Artificial sequence
  Consensus
  Variant (2)..(8): Xaa in position 2 to 8 is any amino acid
  Variant (10)..(10): Xaa in position 10 is any amino acid
  Variant (11)..(11): Xaa in position 11 is Phe or Val
  Variant (12)..(13): Xaa in position 12 to 13 is any amino acid
  Variant (15)..(18): Xaa in position 15 to 18 is any amino acid
  Variant (19)..(19): Xaa in position 19 is Phe, Ile, Leu or Val
  Variant (20)..(20): Xaa in position 20 is Ser or Thr
  Variant (22)..(24): Xaa in position 22 to 24 is any amino acid
WXXXXXXXFXXXXKXXXXXXHXXXL

SEQ ID NO: 69970 - protein, 13 aa, Artificial sequence
  Consensus
  Variant (2)..(9): Xaa in position 2 to 9 is any amino acid
  Variant (10)..(10): Xaa in position 10 is any or no amino acid
  Variant (12)..(12): Xaa in position 12 is Phe or Leu
  Variant (13)..(13): Xaa in position 13 is Pro or Ser
LXXXXXXXXXQXX

SEQ ID NO: 69971 - protein, 17 aa, Artificial sequence
  Consensus
  Variant (2)..(2): Xaa in position 2 is any amino acid
  Variant (4)..(14): Xaa in position 4 to 14 is any amino acid
  Variant (15)..(16): Xaa in position 15 to 16 is any or no amino acid
EXRXXXXXXXXXXXXXL

SEQ ID NO: 69972 - DNA, 1119 bp, Escherichia coli
  CDS (1)..(1119)
atgggaaaaagcatagtcgttgtttctgcggtcaattttaccactggcggtccatttaccattttgaaaaaatttttggcagcaactaataataaagaaaatgtcagttttatcgcattagtccattctgctaaagagttaaaagaaagttatccatgggttaaattcattgagtttcctgaggttaaagggtcgtggctaaaacgtttgcactttgaatatgtagtttgtaaaaaactttcaaaagagctgaatgctacgcattggatttgtctgcatgatattacggccaatgtcgtcactaaaaaaagatatgtgtattgtcataaccctgcacctttttataaaggaattttattccgtgaaattcttatggagcctagctttttcttatttaaaatgctatacgggctgatatataaaataaacattaaaaaaaatactgcagtgtttgttcaacaattctggatgaaagaaaaatttatcaagaaatattctataaataacatcattgtcagtcggccagaaattaaattatctgataaaagccaacttactgatgatgattctcaatttaagaataacccttctgagttgacaatattttaccctgctgttccacgagtatttaaaaattacgagcttattattagtgcagcaaggaaattgaaagaacaatccaatattaaatttctgcttactatcagtggtacagaaaatgcgtatgcaaaatatattatcagtcttgcagaaggactggataatgttcatttcctcgggtacttggataaagaaaaaatcgatcattgttataatatttcagatatagtttgttttccctctaggttagaaacatggggattgccgttgtctgaagctaaagagcgaggtaagtgggtattagcatcagatttcccatttactagagaaactcttggtagttatgaaaagaaagctttttttgattctaataacgatgacatgttagttaaacttattattgacttcaaaaaaggtaacctcaaaaaagatatctctgatgcaaatttcatttatcgtaatgaaaatgtattagttgggtttgatgaactagttaattttattactgaagaacattga

SEQ ID NO: 69973 - protein, 372 aa, Escherichia coli
MGKSIVVVSAVNFTTGGPFTILKKFLAATNNKENVSFIALVHSAKELKESYPWVKFIEFPEVKGSWLKRLHFEYVVCKKLSKELNATHWICLHDITANVVTKKRYVYCHNPAPFYKGILFREILMEPSFFLFKMLYGLIYKINIKKNTAVFVQQFWMKEKFIKKYSINNIIVSRPEIKLSDKSQLTDDDSQFKNNPSELTIFYPAVPRVFKNYELIISAARKLKEQSNIKFLLTISGTENAYAKYIISLAEGLDNVHFLGYLDKEKIDHCYNISDIVCFPSRLETWGLPLSEAKERGKWVLASDFPFTRETLGSYEKKAFFDSNNDDMLVKLIIDFKKGNLKKDISDANFIYRNENVLVGFDELVNFITEEH

SEQ ID NO: 69974 - DNA, 1017 bp, Rickettsia prowazekii str. Madrid E
  CDS (1)..(1017): transl_table=11
atggatcaggaaaagtcgaaaatagtccaaagctttatattttatagtcctggtattcactcaggtggtggactagttttattaaaagagattttaaacgttaaagattttgttaataattgtaagtatatttatctagatgaaagagtaagaagtaaattaaatttctctcatttctttaaaaatattatttttataaaatcacgattattaggagaatggaaattaagaaaaaattgtgaaatgagtgatactgttttatgctttcatggattaccaccattatttcctataaaaagtaaggtaattgtatttttacaaaatagacttttattagaaccgttgaaaaataatcactactcaattttaatattaataaaaaagatttggttacgtttaggtttaaaatttaataatataagatatatagtacaaactgagtctatgctaagaattgctaaagagtttttagatcaagatattgatattgcagtactacctttttcacctaaaactattcaaaaaaatttaaatcatactaaaaaatatgattttttttatcctgcaagtggtgaggctcataaaaatcattttaatttacttaaagcatggaaaattttagctggtataggtataaaaccttctcttgctttaactataaatactgaattataccctgagcttttagagcaaatacaaacataccaattagatatagttaatttaggcgaaatatcttataacgaagtattagacttatatacacaagtttcagtagtaatttatccatcaaaatcagaatcactcggtttacctttaattgaggctacagtatataaaatacctattattgcatcagaacttgattatgttagggatgtatcaaaccctatagagacatttgatccaaattctcccatctcaattgtaagagcagtaagaagatttctaaataataatgagagtttaatagtgctaaattcagcagcagaatttttagaggttatttgtaaataa

SEQ ID NO: 69975 - protein, 338 aa, Rickettsia prowazekii str. Madrid E
MDQEKSKIVQSFIFYSPGIHSGGGLVLLKEILNVKDFVNNCKYIYLDERVRSKLNFSHFFKNIIFIKSRLLGEWKLRKNCEMSDTVLCFHGLPPLFPIKSKVIVFLQNRLLLEPLKNNHYSILILIKKIWLRLGLKFNNIRYIVQTESMLRIAKEFLDQDIDIAVLPFSPKTIQKNLNHTKKYDFFYPASGEAHKNHFNLLKAWKILAGIGIKPSLALTINTELYPELLEQIQTYQLDIVNLGEISYNEVLDLYTQVSVVIYPSKSESLGLPLIEATVYKIPIIASELDYVRDVSNPIETFDPNSPISIVRAVRRFLNNNESLIVLNSAAEFLEVICK

SEQ ID NO: 69976 - DNA, 1113 bp, Clostridium acetobutylicum ATCC 824
  CDS (1)..(1113): transl_table=11
atgacacaaaatttaagagtaataattgatgcgcgtatggttaataagcatctacatgggattgctcgatatacttatgaaataataaaacatatgtcatatgaagataatgtggagatgatactgctcgtgaatgatttagaagaagcaagtaaaatctttggtcaatttaataacataaaatttaaaaggatgagatctaagtttttatctatttttgaacaaattgaattgcctatgattgttaataagtataaaaatatggctatatttcattcgccttcttttgttgcaagcccgtttataaagtgtaagatgattatgacaatacatgatttgaatcatctaaaatttcctcaatattatacaccttttcataagtattattacaaatacatagtaaagaaatgtgcgttgaaaagtaaaaaaatattaactgtttctgaattttctaaggaggaaatttttaagtggataaagtgtgatagggataaaattaaagtcacgtataatggaattgatcctaaatttcatgtgataagtgatgcagagaaattaaaaaaaataaaagaaaaatataagttgccagatagatttattttatatatcggtaacttaaagccacataaaaatgttgaaacattagtaaaagctatgagatttattgacggcaaagttaaattggtaattaacggaacaataaataaatctataagtgagattttagacaaatttaatttgctcgagaaagttaaatttataggttatgttaatgaggatgaattaccactactgtataatttggctagcgtttttgtgtttccatcattatatgaaggatttgggctaccaccattagaggctgctgtgtgtggatgtaaagttattatctctgatatatcgtcattgagtgaaattatgagtgattatggagttaaggtgaatcctctagattcaaaaggaatggcaagagagattaaaaaaatattagaaaatagtagtatagatatttgtaataaagaaaaagaaacttttgttcaaaaatatagttggaataaaactagtagtaagacattagaaatttacaaagaaataaataaagaatttttgtga

SEQ ID NO: 69977 - protein, 370 aa, Clostridium acetobutylicum ATCC 824
MTQNLRVIIDARMVNKHLHGIARYTYEIIKHMSYEDNVEMILLVNDLEEASKIFGQFNNIKFKRMRSKFLSIFEQIELPMIVNKYKNMAIFHSPSFVASPFIKCKMIMTIHDLNHLKFPQYYTPFHKYYYKYIVKKCALKSKKILTVSEFSKEEIFKWIKCDRDKIKVTYNGIDPKFHVISDAEKLKKIKEKYKLPDRFILYIGNLKPHKNVETLVKAMRFIDGKVKLVINGTINKSISEILDKFNLLEKVKFIGYVNEDELPLLYNLASVFVFPSLYEGFGLPPLEAAVCGCKVIISDISSLSEIMSDYGVKVNPLDSKGMAREIKKILENSSIDICNKEKETFVQKYSWNKTSSKTLEIYKEINKEFL

SEQ ID NO: 69978 - DNA, 1056 bp, Methanosarcina acetivorans C2A
  CDS (1)..(1056): transl_table=11
atggaaatagattatataaacggcctgaaaacagatgagatattcgggatgtcaaaatatcaaagtgagattcataagaggttagaaaatgtaaaattaaatcggatagaatatcctaatatatcaaaagtaactggaattaataaaattgtagaatattctgtatatccatttattgtaaaaaaaaaagtaattaagaataatattaagcatgtgacccgtcaagatctagcatttctcctagtattgatgaaattaaaaagaaccatcgttacttgccacgacatcataccgatatcatattataagacccagagccctgtttggaaacttaatggaaaaggattaaggaaagcagaaaaaataataactgtatcagaattctccaaaaaggaaattggtaaatatataaaatatccggaagaaaatattgagatcatacatcccgcagtggatcataatttgtactatcgaaatagaaacaaaatgattttaaaaaaatatgggataaaggataacgagaaagtaattctctatgttggagccgaagagccgagaaaaaacgttcaatttataataaactcattcagcaacttaaagaaaagaattccagaagtaaaattattaaaagttgggatgccaaattatcctggagtaagaagaaaactcattcaacaaatagagtctttaaacctgcagaaagacattatctttgcagggtatgtatcggaactcgcattggcagaaatatacaatgctgtagacttgttcgtatttccatctttgtatgagggattcggaatacctcctttagaagcaatggcttgcggaacccccgtcataacctcaaacacatcctcactacctgaagttgtgggagatgctgcaattcagataaacccttatgatgttgagaaatttgctgaagagatgtatgaagtactgaccaatgagagactcaaagaagaaatgatcagaaaaggactggaaaggtcgaaaatgtttagctgggagaattcagcaaaaaaaacattgaaagtttacagagaaatgtaa

SEQ ID NO: 69979 - protein, 351 aa, Methanosarcina acetivorans C2A
MEIDYINGLKTDEIFGMSKYQSEIHKRLENVKLNRIEYPNISKVTGINKIVEYSVYPFIVKKKVIKNNIKHVTRQDLAFLLVLMKLKRTIVTCHDIIPISYYKTQSPVWKLNGKGLRKAEKIITVSEFSKKEIGKYIKYPEENIEIIHPAVDHNLYYRNRNKMILKKYGIKDNEKVILYVGAEEPRKNVQFIINSFSNLKKRIPEVKLLKVGMPNYPGVRRKLIQQIESLNLQKDIIFAGYVSELALAEIYNAVDLFVFPSLYEGFGIPPLEAMACGTPVITSNTSSLPEVVGDAAIQINPYDVEKFAEEMYEVLTNERLKEEMIRKGLERSKMFSWENSAKKTLKVYREM

SEQ ID NO: 69980 - DNA, 1122 bp, Bacteroides thetaiotaomicron VPI-5482
  CDS (1)..(1122): transl_table=11
atgggaaacaatgcaaaactcatagtcgtgtctgctgtcggattgcgtcagggaggtactttgactattctgaaagagtgcctgcaatatctttctacctgtgtacgtgaggggcatgtacgtgtgatagccattgtacacgacagaaggctcgcggagttcaacggcattgagtatattgaattgccggatgtcatcaaaagttggactcgccggttatggtgcgaatatataaccatgcaccgcatttctcaacgattacccgggattgatttatggctttcactgcatgacaccacccctcgtgtgatagccaaacgacaggcggtctattgccagacttcttttcctttttataagcggacgtggcgtgatttttatttcaactataagatagccctattttcactgttcacccgttatgcttacaggattaatgttcaccgtaatcagtatatgatagtacagcagtcatggctaagggagggacttagcaggatgttaggcgtgggcaaagagaaatttatcgtagcaccgccccgacgtatggcagtcaaagtggaaacggagagcgtgaatttgccttgtttcacattcctatatgcttccgcaccggactgtcacaagaatttcgaggtattatgtcaggccgccaggcttttggagaaggaaaaaggaaaaggctgttttaaagtggtggtcacgctgtccggaaaagaaaaccgttatacccgctggctttataaaaactggcacgatgtgaactcaatcgagtttgccggatatatgaataaggaaaagttatatggttactatcaggccgcacattgtttggtacatgcttccaaagtagaaacctggggcttgccgatttccgaattcggtgaaacgggcaaacccatgttacttgcagatcttccttatgctcatgctacagcttcgggctttcatgccgtaggctacttcaatgaacacaaaccggaagaattgaaaagacttatgaaagaaatgctggagggggatcataggtctctatcatcccaaccttcgactgccataaagggactctatgtgtgttcatggcgggaactgtttgaaaaattactgcctgcttccatttga

SEQ ID NO: 69981 - protein, 373 aa, Bacteroides thetaiotaomicron VPI-5482
MGNNAKLIVVSAVGLRQGGTLTILKECLQYLSTCVREGHVRVIAIVHDRRLAEFNGIEYIELPDVIKSWTRRLWCEYITMHRISQRLPGIDLWLSLHDTTPRVIAKRQAVYCQTSFPFYKRTWRDFYFNYKIALFSLFTRYAYRINVHRNQYMIVQQSWLREGLSRMLGVGKEKFIVAPPRRMAVKVETESVNLPCFTFLYASAPDCHKNFEVLCQAARLLEKEKGKGCFKVVVTLSGKENRYTRWLYKNWHDVNSIEFAGYMNKEKLYGYYQAAHCLVHASKVETWGLPISEFGETGKPMLLADLPYAHATASGFHAVGYFNEHKPEELKRLMKEMLEGDHRSLSSQPSTAIKGLYVCSWRELFEKLLPASI

SEQ ID NO: 69982 - DNA, 1113 bp, Bacteroides thetaiotaomicron VPI-5482
  CDS (1)..(1113): transl_table=11
atgagtagcaagcgaaagacgattgttgtctcagcggttagtttacgtaagggaggtacattaacgatattgcaagattgcttatgttatctttctgctttggcagccgacggcaattatcgggttattgcattggtacataaaagagaattggctgactatccgcacattgaatatattgaaatgccggacgttatcaaagggtggggacgacgtttgtggtgtgaatatgtgacaatgtataaattgtcacaaaaaataatgcctgtatatttatggctgtctcttcatgatgcgactccaagggtggtggctgaacgtcgggttgtctattgccagacttctttccctttttataaatggagttggagggattttctgtttgactataagattgttctatttgctttatttacccgttggatttatcggatcaatgtgcatcggaatacttacctgattgtacaacaggaatggttacgttccggattgagccggatgttgggggtaaaaaaagaaaagttcatagtagctcctccggaacgtaaagagaatgatgtgattgcagaaatagtagaactttcctgttttacattcttttatgctgccacaccagattgccataagaattttgagctgctatgcgacgctgcttctctgttggaacaagagcttggaaaaggaaggttcaaagtggtcttgactattagcggacaagaaaataaatatgcacagtggttatataaaaagttcggttcggtaagttcgatagagttcgcaggattcatgagcagagaaaaactttttggttattatcatgcagttgattgccttgtgtttccgtcaaaggtggaaacatggggattacccgtatctgaatttatggcaacgggtaagccgatgcttctagccgaccttccgtatgctcacgagactgccgctggaagtatgcaaactgcattttttaaattgtcggacccggttcaattaatgaatctgatgaaacggttatgtgaagatgactttacttttctaacgagtatcggtacttctgataaacgtttctcattcgcttcatcctggcgggaattattcgattctatattaaattaa

SEQ ID NO: 69983 - protein, 370 aa, Bacteroides thetaiotaomicron VPI-5482
MSSKRKTIVVSAVSLRKGGTLTILQDCLCYLSALAADGNYRVIALVHKRELADYPHIEYIEMPDVIKGWGRRLWCEYVTMYKLSQKIMPVYLWLSLHDATPRVVAERRVVYCQTSFPFYKWSWRDFLFDYKIVLFALFTRWIYRINVHRNTYLIVQQEWLRSGLSRMLGVKKEKFIVAPPERKENDVIAEIVELSCFTFFYAATPDCHKNFELLCDAASLLEQELGKGRFKVVLTISGQENKYAQWLYKKFGSVSSIEFAGFMSREKLFGYYHAVDCLVFPSKVETWGLPVSEFMATGKPMLLADLPYAHETAAGSMQTAFFKLSDPVQLMNLMKRLCEDDFTFLTSIGTSDKRFSFASSWRELFDSILN

SEQ ID NO: 69984 - DNA, 1014 bp, Staphylococcus haemolyticus JCSC1435
  CDS (1)..(1014): transl_table=11
ttggattatgtaggaaaagttggaggagctagttcgatttcaagacaattttatgaagatgttaaaaatgatgagaataatcaatggatttttttaacaaataaagagtatgtatcacaaaaaagtaatattaaaagaattttagtaaacaatgcaaataaaactttcttacatagattttattttgaaacttttaaaatacctaatattataaataatattaagccagatctagttttatcattacaaaatcttggagttaaacctaagcaaaatcaaattttatatattcatcaagcgctcccatttcaaaataagttatgggagttaagtaataatcctataagcttggttaaaatgctattaatgaaatacaaattgattaaagatataaaaaaatctaatcacataattgtgcaaaccaattatatgaaaaaattaattgaaaaatataataacaatataattgttaacttgccaaattttaattttgccagcccgcaaacacataaagatacaaaagactttttatatcccacaaatgcacaaaaatataaaggtttaaattatatcgttgatttcgctagaatattgaaaaaaaataaacaaaatgtgtatataaatttaactttgataggtaatgaaaataaatatattgaaaatataagaaaaattattaataaagagcaattagctataagattcattggaagacaaaatagtgatgaaatgaatgaactttataaactaaataatttactttttacctcccaagtagaaagtttgggcttacctttaattgaagcagctcattacggatgtaaaatatttgcatatgaaactgatgttactaaagaagtgcttaaaaattataaattcaaagtttttttcaataaatcaaatattgaaagtaaatataaagaatttttaagtttccctccaactactataggggaaaatataaatggtttaaacataaatggaattttgcgaacaaatcacataatcaaatag

SEQ ID NO: 69985 - protein, 337 aa, Staphylococcus haemolyticus JCSC1435
MDYVGKVGGASSISRQFYEDVKNDENNQWIFLTNKEYVSQKSNIKRILVNNANKTFLHRFYFETFKIPNIINNIKPDLVLSLQNLGVKPKQNQILYIHQALPFQNKLWELSNNPISLVKMLLMKYKLIKDIKKSNHIIVQTNYMKKLIEKYNNNIIVNLPNFNFASPQTHKDTKDFLYPTNAQKYKGLNYIVDFARILKKNKQNVYINLTLIGNENKYIENIRKIINKEQLAIRFIGRQNSDEMNELYKLNNLLFTSQVESLGLPLIEAAHYGCKIFAYETDVTKEVLKNYKFKVFFNKSNIESKYKEFLSFPPTTIGENINGLNINGILRTNHIIK

SEQ ID NO: 69986 - DNA, 1155 bp, Candidatus Pelagibacter ubique HTCC1062
  CDS (1)..(1155): transl_table=11
atgtcttcagaattaaaagtactgcaagtaattcctaaacttggatatgggggtgcagaaacaggctgttacgatcttgcacactatttaccagaaaataattgtggttcttatatagtaactagtggaggagagttattaaaatttattgataaaaaaaaagtaaaagtaataaaacttcccgtccatagtaaaaatccatttttaatgctctttaattcaatagctttgatttttattattttactaaataatatatctattgttcatgcaagaagtcgtgctccagcttggtcttgtttgtttgcaacaaaaattacaagaagaaagtttgttacaacttttcatggtacttataattttaaaaactcaattaaaaaattctataattcagtaatggttagatcagatttaataatagcaggatcaaattttattttttcacatattaatcaaaattatccaaaatttttagatttaaaaaaaaaattcttagtaatttttaggggaattaatgtcgattattttgaattatcaacaattttagacagtgaagaaaacagacttatttcagattgggaagttgatagaaataaaaaaacgatcctaatgccaggtcggttaactgcttggaaaggtcaggagacatttattgaggcattaaatcttgttaataaagaactgggctatgagtcttttaatgcagttattttgggtagcgatcaagaaagagacatttataccaaaaaaattaaaagattggctgagcaatataggctaactagtcagttaaaatttatagaacattgtaaaaatatgccgttagcctacaaaatatcagacattgttgtttcagcctcagtagaacctgaagcttttggaagggtagcagttgaagcccaatcaatggaaaaaccaataattgcaagtgatattgggggatctaatgaaactattatcgataacgtgacaggttttttatttcagtctggcaatgcagaagctttgagtaaaaaaataatagaagtcttacaattagacgaatctagattgaaatctattggtatagaaggtagaaaaaatataattaaaaaatttaatgttgaaaaaatgtgtttttctacatattcagaatacaaaaaattattgaattaa

SEQ ID NO: 69987 - protein, 384 aa, Candidatus Pelagibacter ubique HTCC1062
MSSELKVLQVIPKLGYGGAETGCYDLAHYLPENNCGSYIVTSGGELLKFIDKKKVKVIKLPVHSKNPFLMLFNSIALIFIILLNNISIVHARSRAPAWSCLFATKITRRKFVTTFHGTYNFKNSIKKFYNSVMVRSDLIIAGSNFIFSHINQNYPKFLDLKKKFLVIFRGINVDYFELSTILDSEENRLISDWEVDRNKKTILMPGRLTAWKGQETFIEALNLVNKELGYESFNAVILGSDQERDIYTKKIKRLAEQYRLTSQLKFIEHCKNMPLAYKISDIVVSASVEPEAFGRVAVEAQSMEKPIIASDIGGSNETIIDNVTGFLFQSGNAEALSKKIIEVLQLDESRLKSIGIEGRKNIIKKFNVEKMCFSTYSEYKKLLN

SEQ ID NO: 69988 - DNA, 1134 bp, Candidatus Pelagibacter ubique HTCC1062
  CDS (1)..(1134): transl_table=11
atgattaaaattctttattttttagaccatccaattcaatatcaaaatccatttttagacagaatatcactttcttcaaaaattaatttaaacgttatttatctatcagacttttctctaaaaccttatttcgacgaaggtttgaataaaactattaaattcgatgatattgaaaactttagtcacaaacatcaatttatatttaaagataaaaataaaagtaaaataaaatttttaattaggctcactaagatattgtttaaagaaaaacctaagtatttttgggtacatggatattctaatttttactcaatgtcatcaataattattgctcgtttgttaagtatcaaagttttgttaagaggtgaaagtagtaatttttttaaaaacaatttaaaatctaaaattagtatttttttattttttaaaataattgatccactaattacaaactatctagcaattggtaaaaaaaataaagaattctatcttaataatacaaaaaaaaatattcttaaacttccttacattgttggaaatttatctaaaaaaaaaataataaaaaaagaggatttaatgaatttaagaaaaaaaattcaaattaaacaaaactcttttataatattttataatgcaaaaatcatagatagaaaaaatccagagttattaattaagtcttttttaaaaatagagaaagcttgcaaaatcccagtgactttaattattgcgggagatggtaatattaaagatagattaattaatagatataaaaactttagaaatataaaatttgttggctttataaatcagaacttgttatgtcaattttatgctttatcagatttatttgttttgccatctaaatatgatgcttggggacttgtagtaaatgaagcaatgagtttttcaaaacctgttataacctcaaggaatgttatttcatcatacgatcttgtaaaacaaaacgtaaatggagttgcttttaataataaatttcatttagaacaatccataattaatattattaacaataaagatataagatataggtattcaaaaaactcaaagataattataaaaaattggagtatagaaacagctaataaatacttccataaaatatttgtaaaataa

SEQ ID NO: 69989 - protein, 377 aa, Candidatus Pelagibacter ubique HTCC1062
MIKILYFLDHPIQYQNPFLDRISLSSKINLNVIYLSDFSLKPYFDEGLNKTIKFDDIENFSHKHQFIFKDKNKSKIKFLIRLTKILFKEKPKYFWVHGYSNFYSMSSIIIARLLSIKVLLRGESSNFFKNNLKSKISIFLFFKIIDPLITNYLAIGKKNKEFYLNNTKKNILKLPYIVGNLSKKKIIKKEDLMNLRKKIQIKQNSFIIFYNAKIIDRKNPELLIKSFLKIEKACKIPVTLIIAGDGNIKDRLINRYKNFRNIKFVGFINQNLLCQFYALSDLFVLPSKYDAWGLVVNEAMSFSKPVITSRNVISSYDLVKQNVNGVAFNNKFHLEQSIINIINNKDIRYRYSKNSKIIIKNWSIETANKYFHKIFVK

SEQ ID NO: 69990 - DNA, 1134 bp, Rhodoferax ferrireducens DSM 15236
  CDS (1)..(1134): transl_table=11
ttggaaaggaatataggcatgccacgtatcgttgtttccgcagtaaatttcactgagggcgggccgctcacggtgctgcgtgagtgcctcgcatccgcggcggctgtgctccccgctgagttcgagatcatagccatagtaaatcgtgctgatctgatcaatgaaccgcgggttcgtttgatttcaattccgagttcaaagaaatcctggtttcataggctttactgggaatggtgcgggttcagtcgtatttcccacgaactaaagcccacgttgtggctatcgctgcacgacatcacgccgcgcgtgtcagctgctcgccaagcagtgtattgtcataatccttcgcccttttatcgcatcggtctacgtgaggctttgatggagccaacgttcctcatgttcaaccagttctacgctttgctgtaccgactcttcatccgtcgcaaccactgcgttatcgtgcagcaagactggcttcgcgccgagtttataaaacggatggggcagctccctgtggtcgtcgctcacccctcctttcgggctgccgagcgtcccagcgctccgaagcgtggaccggcattcgtctttatctatccagctctgccacgggtatttaagaacatcgagactttgtgcaaagcggcacagctattggtttcccggggggtcggcggcttcgaggtacggctgactcttgacggcagcgaaaatcgatacgctcgctggcttcgaaatcggtttggcgatacggcgcacgtccgatttataggccgacagactaaagatgagatggacgcccactatggtgaggcctccgcagtcgtgtttccgagcaagctggagacttgggggttgcccattaccgaaggcaaggcacaacggcggccgcttctcgtggccgatctcccatatgcacgggaaaccgttgggacctacgatctcgtgagctttttcccggccgaatcttctgaggcgcttgctgatctcatgcagtcgatgatcgagcaaacgtggcgaccgaccggcaacgaccatcctgaccccgcggctccgtttgcacccaattgggctagcctgtggggcatcctcattagcgggctgccgtctgcagcacagaactccggtgattga

SEQ ID NO: 69991 - protein, 377 aa, Rhodoferax ferrireducens DSM 15236
MERNIGMPRIVVSAVNFTEGGPLTVLRECLASAAAVLPAEFEIIAIVNRADLINEPRVRLISIPSSKKSWFHRLYWEWCGFSRISHELKPTLWLSLHDITPRVSAARQAVYCHNPSPFYRIGLREALMEPTFLMFNQFYALLYRLFIRRNHCVIVQQDWLRAEFIKRMGQLPVVVAHPSFRAAERPSAPKRGPAFVFIYPALPRVFKNIETLCKAAQLLVSRGVGGFEVRLTLDGSENRYARWLRNRFGDTAHVRFIGRQTKDEMDAHYGEASAVVFPSKLETWGLPITEGKAQRRPLLVADLPYARETVGTYDLVSFFPAESSEALADLMQSMIEQTWRPTGNDHPDPAAPFAPNWASLWGILISGLPSAAQNSGD

SEQ ID NO: 69992 - DNA, 1080 bp, Lactobacillus rhamnosus
  CDS (1)..(1080): transl_table=11
atgcattatgtcatcgtcgattttgtagtaaggcaaaattctggagggatattatcaatattacaagatgtcaataaatttgcgcttgaacatacagaagaccgttttacgtttatagttgggacagatggtctgatcactacttcgccaaacataaaggttattttgcgccctgatttgcagcgtaactacataaaaagaatttttttcgatttctggagaggtgctggtgtcattaattctttaaaaccggatgtggttatttctctacagaataccgccgttcttggagttaatgctcctgaaatgttatatgtgcaccaacctctcccgttcgaaacaaattataaatttagcttctttaaaagctcggagaggaaaatggctttttaccaaagtttagtgggcagtgttatcaaattgaacttaaggagttttcataagggggcaatcacggtacaaactcactggatgttggaagaagtacagaagtacgctaaaacaccaatttttgtaacgcgaccatctattgataaaaatgatttcaaaggtcagattttaggaagtaaaggaagcaatttcttttttccgagtactgcaatggtttataagaaccatcgaaatctagttgacgcctatgaaatgctttctgacgaagtaaggcgtgaacatcacttaatatttacgatctctagaaaggaatacggtcgtttgtacgggcaagtacctgatgattcgaatattaagtttctaggaaggattcctcgggctaaggtaatcgaaattttaaatcatagtatattagtctttccttcaaaaattgaaactctcgggttaccgcttattgaagcaatgatattgcaaagacagattgttgctgcaaatatcagcccggtcactgaagtaactagtgagtacgattcgattagttactttgatcctgatgatgtgaagtctatttacaactctctattggccggaataagaatgaatccttctaggagaagctttaaagagacaaatgacaatggttggcaggcattcttttctaatgtagaggcattgaatcatgcaaaatag

SEQ ID NO: 69993 - protein, 359 aa, Lactobacillus rhamnosus
MHYVIVDFVVRQNSGGILSILQDVNKFALEHTEDRFTFIVGTDGLITTSPNIKVILRPDLQRNYIKRIFFDFWRGAGVINSLKPDVVISLQNTAVLGVNAPEMLYVHQPLPFETNYKFSFFKSSERKMAFYQSLVGSVIKLNLRSFHKGAITVQTHWMLEEVQKYAKTPIFVTRPSIDKNDFKGQILGSKGSNFFFPSTAMVYKNHRNLVDAYEMLSDEVRREHHLIFTISRKEYGRLYGQVPDDSNIKFLGRIPRAKVIEILNHSILVFPSKIETLGLPLIEAMILQRQIVAANISPVTEVTSEYDSISYFDPDDVKSIYNSLLAGIRMNPSRRSFKETNDNGWQAFFSNVEALNHAK

SEQ ID NO: 69994 - DNA, 1080 bp, Lactobacillus rhamnosus
  CDS (1)..(1080): transl_table=11
atgcattatgtcatcgtcgattttgtagtaaggcaaaattctggagggatattatcaatattacaagatgtcaataaatttgcgcttgaacatacagaagaccgttttacgtttatagttgggacagatggtctgatcaatacttcgccaaacataaaggttattttgcgacctgatttgcagcgtaactacataaaaagaatttttttcgatttctggagaggtgctggtgtcattaattctttgaaaccggatgtggttatttctctacagaataccgccgttcttggagttaatgctcctgaaatgttatatgtgcaccaacctcttccgttcgaaacaaattataaatttagcttctttaaaaactcggagaggaaaatggctttttaccaaagtttagtgggtagtgttatcaaatcgaacttaaggagttttcataagggggcaatcacggtacaaactcactggatgttggaagaagtacagaagtacgctaaaacaccaatttttgtaacgcgaccatctattgataaaaatgatttcagaggtcagattttaggaagtaaaggaagcaatttcttttttccgagtactgcaatgatttataagaaccatcgaaatctagttgacgcctatgaaatgctttctaacgaagtaaggcatgaacatcacttaatatttacgatctctagaaaggaatacggtcgtttgtacgggcaagtacctgatgattcgaatattaagtttctcggaagaattcctcgggctaaggtaatcgaaattttaaatcatagtatattagtctttccttcaaaaattgaaactctcgggttaccgcttattgaagcgatgatattgcaaagacagattgttgctgcaaatatcagcccggtcactgaagtaactagtgagtacgattcgattagttacttcgatcctgatgatgtgaagtctatttacaactctctattggccggaataagaatgaatccttctaggagaggctttaaagagacaaatgacaatggttggcaggcattcttttctaatgtagaggcattgaatcatgcaaaatag

SEQ ID NO: 69995 - protein, 359 aa, Lactobacillus rhamnosus
MHYVIVDFVVRQNSGGILSILQDVNKFALEHTEDRFTFIVGTDGLINTSPNIKVILRPDLQRNYIKRIFFDFWRGAGVINSLKPDVVISLQNTAVLGVNAPEMLYVHQPLPFETNYKFSFFKNSERKMAFYQSLVGSVIKSNLRSFHKGAITVQTHWMLEEVQKYAKTPIFVTRPSIDKNDFRGQILGSKGSNFFFPSTAMIYKNHRNLVDAYEMLSNEVRHEHHLIFTISRKEYGRLYGQVPDDSNIKFLGRIPRAKVIEILNHSILVFPSKIETLGLPLIEAMILQRQIVAANISPVTEVTSEYDSISYFDPDDVKSIYNSLLAGIRMNPSRRGFKETNDNGWQAFFSNVEALNHAK

SEQ ID NO: 69996 - DNA, 1080 bp, Lactobacillus rhamnosus
  CDS (1)..(1080): transl_table=11
atgcattatgtcatcgtcgattttgtagtaaggcaaaattctggagggatattatcaatattacaagatgtcaataaatttgcgcttgaacatacagaagaccgttttacgtttatagttgggacagatggtctgatcaatacttcgccaaacataaaggttattttgcgacctgatttgcagcgtaactacataaaaagaatttttttcgatttctggagaggtgctggtgtcattaattctttgaaaccggatgtggttatttctctacagaataccgccgttcttggagttaatgctcctgaaatgttatatgtgcaccaacctcttccgttcgaaacaaattataaatttagcttctttaaaaactcggagaggaaaatggctttttaccaaagtttagtgggtagtgttatcaaattgaacttaaggagttttcataagggggcaatcacggtacaaactcactggatgttggaagaagtacagaagtacgctaaaacaccaatttttgtaacgcgaccatctattgataaaaatgatttcagaggtcagattttaggaagtaaaggaagcaatttcttttttccgagtactgcaatgatttataagaaccatcgaaatctagttgacgcctatgaaatgctttctaacgaagtaaggcatgaacatcacttaatatttacgatctctagaaaggaatacggtcgtttgtacgggcaagtacctgatgattcgaatattaagtttctcggaagaattcctcgggctaaggtaatcgaaattttaaatcatagtatattagtctttccttcaaaaattgaaactctcgggttaccgcttattgaagcgatgatattgcaaagacagattgttgctgcaaatatcagcccggtcactgaagtaactagtgagtacgattcgattagttacttcgatcctgatgatgtgaagtctatttacaactctctattggccggaataagaatgaatccttctaggagaggctttaaagagacaaatgacaatggttggcaggcattcttttctaatgtagaggcattgaatcatgcaaaatag

SEQ ID NO: 69997 - protein, 359 aa, Lactobacillus rhamnosus
MHYVIVDFVVRQNSGGILSILQDVNKFALEHTEDRFTFIVGTDGLINTSPNIKVILRPDLQRNYIKRIFFDFWRGAGVINSLKPDVVISLQNTAVLGVNAPEMLYVHQPLPFETNYKFSFFKNSERKMAFYQSLVGSVIKLNLRSFHKGAITVQTHWMLEEVQKYAKTPIFVTRPSIDKNDFRGQILGSKGSNFFFPSTAMIYKNHRNLVDAYEMLSNEVRHEHHLIFTISRKEYGRLYGQVPDDSNIKFLGRIPRAKVIEILNHSILVFPSKIETLGLPLIEAMILQRQIVAANISPVTEVTSEYDSISYFDPDDVKSIYNSLLAGIRMNPSRRGFKETNDNGWQAFFSNVEALNHAK

SEQ ID NO: 69998 - DNA, 1104 bp, Escherichia coli
  CDS (1)..(1104): transl_table=11
atgtttgatctgtccaaaaattatattattgtaagtgcgacggcgctggcttccggaggtgcattaactatattaaagcaatttataaaacatgcatcacaaaattcaaatgactatattatgtttgtatctgcgggattggagttgccggtctgtgataacatcatttacatagaaaacacaccaaaaggatggttgaaaagaatatattgggattggttcggttgtcggaagtttatctcggaacataagattaacgttaagaaagtaatttctctacaaaattccagtttgaatgttccttacgaacagattatttacttgcaccagccaattccttttagtaaagttgattcttttttaaaaaatatcacatccgataacgtaaagctttttttatataaaaagttttattcctattttatatttaaatatgtgaatgccaatacaaccatcgtagtgcaaacgaattggatgaaaaaaggagtgctggagcaatgtgataaaattagtaccgaaagggtccttgttataaaacctgatatcaaagcatttaataatactaattttgatgtagatatggatgtatctgcaaaaacactcttatatccagcgacaccacttacctataaaaatcatttggtcattctgaaggcgttggttattttaaagaaaaagtattttatagatgatctgaaattccaagtgacttttgaaaagaataggtacaaaaattttgataagtttgtgcaattaaataacttaagcaaaaacgttgattatctcggcgttctttcatactcgaacttgcaaaaaaaatatatggcggcatctttaatcgtttttcctagctatatcgaatcatatgggttaccactcatcgaagctgctagtttaggaaaaaaaatcattagtagtgatcttccttatgcccgggatgttttaaaggattatagcggcgtagattttgtaatttacaataatgaagatggctgggctaaggcgttgtttaatgttttaaatggcaattcgaagctcaattttaggccttatgaaaaagatagtcgttcatcttggccacagttcttctctattttgaaataa

SEQ ID NO: 69999 - protein, 367 aa, Escherichia coli
MFDLSKNYIIVSATALASGGALTILKQFIKHASQNSNDYIMFVSAGLELPVCDNIIYIENTPKGWLKRIYWDWFGCRKFISEHKINVKKVISLQNSSLNVPYEQIIYLHQPIPFSKVDSFLKNITSDNVKLFLYKKFYSYFIFKYVNANTTIVVQTNWMKKGVLEQCDKISTERVLVIKPDIKAFNNTNFDVDMDVSAKTLLYPATPLTYKNHLVILKALVILKKKYFIDDLKFQVTFEKNRYKNFDKFVQLNNLSKNVDYLGVLSYSNLQKKYMAASLIVFPSYIESYGLPLIEAASLGKKIISSDLPYARDVLKDYSGVDFVIYNNEDGWAKALFNVLNGNSKLNFRPYEKDSRSSWPQFFSILK

SEQ ID NO: 70000 - DNA, 1080 bp, Escherichia coli
  CDS (1)..(1080): transl_table=11
atgaaaattattatatatgcgacagcagcagttgatggtggcgctctttcgcttttaaatgatttgctggaatatgcgaatgatgatattgataatgaatatactgtttgcgttaatgaaaaattaaataacgaagtgtctgtttacaataatttgacatttttatttgttgatactaaagcttggcataaaagggtttattttgactttatagggtttaaaaaaaactttgataataaagattattgcttggtaataaatttgcaaaatataccagttcggacacaattaaaacaaatattgtacttgcatcagcctttgcctttttcggatattaagttaaatattttggagaagcgtaatagaaaattgatattctataaatacttatatggattaataataaaatttaattcatgttttattgatcattgcttagtgcaaactgagtggatgagaaaagctgttattgataaactaaacctgtctgagaaaaaaataagtataattagaccagtaatagatattgatttgaacaaaattttaaaaaatgaaaatgaaaatgaaaatacattcatctatcccgcagcatcttatagttataaaaatcatataatattggttgaatcattaaatatgattggtgtggattttttgtttcagaataagataactgttatatttacattagatcgtgatgaaaattcgaagttgtttgatcggataaaaaaatataatcttcaagagattattaaatttacaggaaatatcccaagatatgatgttttaaattacatttataatgctaaagccttactgtttccatcaagactagaaacatttggtataccattgatagaagctgtaaaatttaattctaacataattgtaagtgatctaccttatgcgcacgacgtattggatggttatgaaaatgtcaaatactgtaatcctgattctccagaggattggtctgaagcaatcaaatttgctatcaatctaaaagagaataaattaaatcagggctttgaattaaattcagggtggagagagttgagttcgattatttcaactctttaa

SEQ ID NO: 70001 - protein, 359 aa, Escherichia coli
MKIIIYATAAVDGGALSLLNDLLEYANDDIDNEYTVCVNEKLNNEVSVYNNLTFLFVDTKAWHKRVYFDFIGFKKNFDNKDYCLVINLQNIPVRTQLKQILYLHQPLPFSDIKLNILEKRNRKLIFYKYLYGLIIKFNSCFIDHCLVQTEWMRKAVIDKLNLSEKKISIIRPVIDIDLNKILKNENENENTFIYPAASYSYKNHIILVESLNMIGVDFLFQNKITVIFTLDRDENSKLFDRIKKYNLQEIIKFTGNIPRYDVLNYIYNAKALLFPSRLETFGIPLIEAVKFNSNIIVSDLPYAHDVLDGYENVKYCNPDSPEDWSEAIKFAINLKENKLNQGFELNSGWRELSSIISTL

SEQ ID NO: 70002 - DNA, 1035 bp, Shigella boydii
  CDS (1)..(1035): transl_table=11
gtgtcaaatttaaaaaaatataagtttataatttttattcctgatagcattaatttgcctaaagcagttaatatcagatatatccctgtgcctaaaaaaaattggctatctaggatatattgggatagttatggcttaagaaaatatattcgagtaaatcggcttcaatatcaggcggtcatttctcttcagaatacatctgtaaatgtagaaggaaaacagataatatatcttcaccaatctataccatttatagattttgatattccactgacaagtttatttaatttaaaattatggctatacaagcgattttattcttattttatatttttatttgttaacaagaatacttcttttattgtccaagccaaatggctgaaagagctcctttctgataagtatcatatcgatgcaaaaaaaatatctatcataaagcccaaagcaagatatgttcctctagcaactaactctattcataatgtagccaacttatctaagcaattctgtaatattatttatccagcaacaccaatattttataaaaatcattgtgttattattgatgctcttaggattttaagagaacagcgcaatattgataacttatgttttaatgtcaccttttcaaaaggtgagtatgctaagtttgacgatttggttaggcgttataacttgggtaagaatattcgctatttgggatatttgacccgagatgaattatatcaacattatgataatagcgcttttatggtctaccccagttatgtggaaacctgtgggcttccgttgctggaggctgcttctaagcagttgccaataatcgctagtgatctgccttatgcatgtgaaatgcttgaggcttatactggcgtcgtttatgttaagttcaatgtctctaccgaatgggctcgagaaattgatacgatggcccgagctggtgaaactcgaattattccgccgttattaaaagcggagaatgattctgattggaataagttagataatattattgaaggaaaagatgatgtttaa

SEQ ID NO: 70003 - protein, 344 aa, Shigella boydii
MSNLKKYKFIIFIPDSINLPKAVNIRYIPVPKKNWLSRIYWDSYGLRKYIRVNRLQYQAVISLQNTSVNVEGKQIIYLHQSIPFIDFDIPLTSLFNLKLWLYKRFYSYFIFLFVNKNTSFIVQAKWLKELLSDKYHIDAKKISIIKPKARYVPLATNSIHNVANLSKQFCNIIYPATPIFYKNHCVIIDALRILREQRNIDNLCFNVTFSKGEYAKFDDLVRRYNLGKNIRYLGYLTRDELYQHYDNSAFMVYPSYVETCGLPLLEAASKQLPIIASDLPYACEMLEAYTGVVYVKFNVSTEWAREIDTMARAGETRIIPPLLKAENDSDWNKLDNIIEGKDDV

SEQ ID NO: 70004 - DNA, 25 bp, Artificial sequence
  Primer sequence
atgggaaaaagcatagtcgttgttt

SEQ ID NO: 70005 - DNA, 28 bp, Artificial sequence
  Primer sequence
ttaatgttcttcagtaataaaattaact

SEQ ID NO: 70006 - protein, 294 aa, Artificial sequence
  Consensus
  Variant (3)..(173): Xaa in position 3 to 173 is any amino acid
  Variant (174)..(205): Xaa in position 174 to 205 is any or no amino acid
  Variant (208)..(250): Xaa in position 208 to 250 is any amino acid
  Variant (251)..(259): Xaa in position 251 to 259 is any or no amino acid
  Variant (261)..(278): Xaa in position 261 to 278 is any amino acid
  Variant (279)..(279): Xaa in position 279 is any or no amino acid
  Variant (282)..(283): Xaa in position 282 to 283 is any amino acid
  Variant (284)..(284): Xaa in position 284 is any or no amino acid
  Variant (286)..(287): Xaa in position 286 to 287 is any amino acid
  Variant (291)..(292): Xaa in position 291 to 292 is any amino acid
GGXXXXXXXXXXXXXXXXXXXXXXXXXXXXXXXXXXXXXXXXXXXXXXXXXXXXXXXXXXXXXXXXXXXXXXXXXXXXXXXXXXXXXXXXXXXXXXXXXXXXXXXXXXXXXXXXXXXXXXXXXXXXXXXXXXXXXXXXXXXXXXXXXXXXXXXXXXXXXXXXXXXXXXXXXXXXXXXXXXXXXXXXXXXXXXXXXXXXXXXXXXXKNXXXXXXXXXXXXXXXXXXXXXXXXXXXXXXXXXXXXXXXXXXXXXXXXXXXXGXXXXXXXXXXXXXXXXXXXPSXXXEXXGLPXXEA

SEQ ID NO: 70007 - protein, 12 aa, Artificial sequence
  Consensus
  Variant (2)..(3): Xaa in position 2 to 3 is any or no amino acid
  Variant (5)..(5): Xaa in position 5 is Gly, Ser or Thr
  Variant (6)..(6): Xaa in position 6 is any amino acid
  Variant (8)..(8): Xaa in position 8 is Ile or Leu
  Variant (10)..(10): Xaa in position 10 is Ile, Leu or Pro
  Variant (11)..(11): Xaa in position 11 is any amino acid
SXXEXXGXPXXE

SEQ ID NO: 70008 - DNA, 1185 bp, Saccharomyces cerevisiae; identical to SEQ ID NO: 19013
  CDS (1)..(1185)

SEQ ID NO: 70009 - protein, 394 aa, Saccharomyces cerevisiae; identical to SEQ ID NO: 19014

SEQ ID NO: 70010 - DNA, 1362 bp, Saccharomyces cerevisiae; identical to SEQ ID NO: 19015
  CDS (1)..(1362)

SEQ ID NO: 70011 - protein, 453 aa, Saccharomyces cerevisiae; identical to SEQ ID NO: 19016

SEQ ID NO: 70012 - DNA, 1338 bp, Saccharomyces cerevisiae; identical to SEQ ID NO: 19017
  CDS (1)..(1338)

SEQ ID NO: 70013 - protein, 445 aa, Saccharomyces cerevisiae; identical to SEQ ID NO: 19018

SEQ ID NO: 70014 - DNA, 1287 bp, Schizosaccharomyces pombe; identical to SEQ ID NO: 19019
  CDS (1)..(1287)

SEQ ID NO: 70015 - protein, 428 aa, Schizosaccharomyces pombe; identical to SEQ ID NO: 19020

SEQ ID NO: 70016 - DNA, 1621 bp, Arabidopsis thaliana; identical to SEQ ID NO: 19021
  CDS (86)..(1342)

SEQ ID NO: 70017 - protein, 418 aa, Arabidopsis thaliana; identical to SEQ ID NO: 19022

SEQ ID NO: 70018 - DNA, 1068 bp, Caenorhabditis elegans; identical to SEQ ID NO: 19023
  CDS (1)..(1068)

SEQ ID NO: 70019 - protein, 355 aa, Caenorhabditis elegans; identical to SEQ ID NO: 19024

SEQ ID NO: 70020 - DNA, 1152 bp, Oryza sativa; identical to SEQ ID NO: 19025
  CDS (1)..(1152)

SEQ ID NO: 70021 - protein, 383 aa, Oryza sativa; identical to SEQ ID NO: 19026

SEQ ID NO: 70022 - DNA, 1485 bp, Debaryomyces hansenii CBS767; identical to SEQ ID NO: 19027
  CDS (1)..(1485)

SEQ ID NO: 70023 - protein, 494 aa, Debaryomyces hansenii CBS767; identical to SEQ ID NO: 19028

SEQ ID NO: 70024 - DNA, 1329 bp, Debaryomyces hansenii CBS767; identical to SEQ ID NO: 19029
  CDS (1)..(1329)

SEQ ID NO: 70025 - protein, 442 aa, Debaryomyces hansenii CBS767; identical to SEQ ID NO: 19030

SEQ ID NO: 70026 - DNA, 1413 bp, Debaryomyces hansenii CBS767; identical to SEQ ID NO: 19031
  CDS (1)..(1413)

SEQ ID NO: 70027 - protein, 470 aa, Debaryomyces hansenii CBS767; identical to SEQ ID NO: 19032

SEQ ID NO: 70028 - DNA, 1404 bp, Debaryomyces hansenii CBS767; identical to SEQ ID NO: 19033
  CDS (1)..(1404)

SEQ ID NO: 70029 - protein, 467 aa, Debaryomyces hansenii CBS767; identical to SEQ ID NO: 19034

SEQ ID NO: 70030 - DNA, 1260 bp, Yarrowia lipolytica CLIB99; identical to SEQ ID NO: 19035
  CDS (1)..(1260)

SEQ ID NO: 70031 - protein, 419 aa, Yarrowia lipolytica CLIB99; identical to SEQ ID NO: 19036

SEQ ID NO: 70032 - DNA, 1470 bp, Yarrowia lipolytica CLIB99; identical to SEQ ID NO: 19037
  CDS (1)..(1470)

SEQ ID NO: 70033 - protein, 489 aa, Yarrowia lipolytica CLIB99; identical to SEQ ID NO: 19038

SEQ ID NO: 70034 - DNA, 1230 bp, Kluyveromyces lactis NRRL Y; identical to SEQ ID NO: 19039
  CDS (1)..(1230)

SEQ ID NO: 70035 - protein, 409 aa, Kluyveromyces lactis NRRL Y; identical to SEQ ID NO: 19040

SEQ ID NO: 70036 - DNA, 1086 bp, Xenopus laevis; identical to SEQ ID NO: 19041
  CDS (1)..(1086)

SEQ ID NO: 70037 - protein, 361 aa, Xenopus laevis; identical to SEQ ID NO: 19042

SEQ ID NO: 70038 - DNA, 1161 bp, Candida glabrata CBS138; identical to SEQ ID NO: 19043
  CDS (1)..(1161)

SEQ ID NO: 70039 - protein, 386 aa, Candida glabrata CBS138; identical to SEQ ID NO: 19044

SEQ ID NO: 70040 - DNA, 1356 bp, Candida glabrata CBS138; identical to SEQ ID NO: 19045
  CDS (1)..(1356)

SEQ ID NO: 70041 - protein, 451 aa, Candida glabrata CBS138; identical to SEQ ID NO: 19046

SEQ ID NO: 70042 - DNA, 1272 bp, Candida glabrata CBS138; identical to SEQ ID NO: 19047
  CDS (1)..(1272)

SEQ ID NO: 70043 - protein, 423 aa, Candida glabrata CBS138; identical to SEQ ID NO: 19048

SEQ ID NO: 70044 - DNA, 1155 bp, Ashbya gossypii; identical to SEQ ID NO: 19049
  CDS (1)..(1155)

SEQ ID NO: 70045 - protein, 384 aa, Ashbya gossypii; identical to SEQ ID NO: 19050

SEQ ID NO: 70046 - DNA, 1602 bp, Neurospora crassa; identical to SEQ ID NO: 19051
  CDS (1)..(1602)

SEQ ID NO: 70047 - protein, 533 aa, Neurospora crassa; identical to SEQ ID NO: 19052

SEQ ID NO: 70048 - DNA, 1080 bp, Caenorhabditis elegans; identical to SEQ ID NO: 19053
  CDS (1)..(1080)

SEQ ID NO: 70049 - protein, 359 aa, Caenorhabditis elegans; identical to SEQ ID NO: 19054

SEQ ID NO: 70050 - DNA, 1029 bp, Mus musculus; identical to SEQ ID NO: 19055
  CDS (1)..(1029)

SEQ ID NO: 70051 - protein, 342 aa, Mus musculus; identical to SEQ ID NO: 19056

SEQ ID NO: 70052 - DNA, 1029 bp, Homo sapiens; identical to SEQ ID NO: 19057
  CDS (1)..(1029)

SEQ ID NO: 70053 - protein, 342 aa, Homo sapiens; identical to SEQ ID NO: 19058

SEQ ID NO: 70054 - DNA, 1328 bp, Homo sapiens; identical to SEQ ID NO: 19059
  CDS (7)..(1056)

SEQ ID NO: 70055 - protein, 349 aa, Homo sapiens; identical to SEQ ID NO: 19060

SEQ ID NO: 70056 - DNA, 25 bp, Artificial sequence
  Primer sequence
atgtggacaaacactttcaaatggt

SEQ ID NO: 70057 - DNA, 25 bp, Artificial sequence
  Primer sequence
ttactttgacaggaacgagactaaa

SEQ ID NO: 70058 - protein, 474 aa, Artificial sequence; identical to SEQ ID NO: 19063
  Consensus
  Variant (9)..(12): Xaa in position 9 to 12 is any amino acid
  Variant (14)..(19): Xaa in position 14 to 19 is any amino acid
  Variant (21)..(29): Xaa in position 21 to 29 is any amino acid
  Variant (30)..(35): Xaa in position 30 to 35 is any or no amino acid
  Variant (38)..(38): Xaa in position 38 is any amino acid
  Variant (40)..(40): Xaa in position 40 is any amino acid
  Variant (42)..(42): Xaa in position 42 is any amino acid
  Variant (44)..(55): Xaa in position 44 to 55 is any amino acid
  Variant (56)..(108): Xaa in position 56 to 108 is any or no amino acid
  Variant (110)..(111): Xaa in position 110 to 111 is any amino acid
  Variant (114)..(115): Xaa in position 114 to 115 is any amino acid
  Variant (118)..(118): Xaa in position 118 is any amino acid
  Variant (121)..(124): Xaa in position 121 to 124 is any amino acid
  Variant (126)..(129): Xaa in position 126 to 129 is any amino acid
  Variant (130)..(134): Xaa in position 130 to 134 is any or no amino acid
  Variant (140)..(140): Xaa in position 140 is any amino acid
  Variant (145)..(147): Xaa in position 145 to 147 is any amino acid
  Variant (149)..(149): Xaa in position 149 is any amino acid
  Variant (153)..(164): Xaa in position 153 to 164 is any or no amino acid
  Variant (166)..(167): Xaa in position 166 to 167 is any amino acid
  Variant (169)..(170): Xaa in position 169 to 170 is any amino acid
  Variant (172)..(172): Xaa in position 172 is any amino acid
  Variant (174)..(175): Xaa in position 174 to 175 is any amino acid
  Variant (177)..(177): Xaa in position 177 is any amino acid
  Variant (179)..(205): Xaa in position 179 to 205 is any amino acid
  Variant (206)..(279): Xaa in position 206 to 279 is any or no amino acid
  Variant (282)..(283): Xaa in position 282 to 283 is any amino acid
  Variant (286)..(286): Xaa in position 286 is any amino acid
  Variant (287)..(287): Xaa in position 287 is any or no amino acid
  Variant (289)..(290): Xaa in position 289 to 290 is any amino acid
  Variant (292)..(324): Xaa in position 292 to 324 is any amino acid
  Variant (325)..(354): Xaa in position 325 to 354 is any or no amino acid
  Variant (356)..(362): Xaa in position 356 to 362 is any amino acid
  Variant (364)..(364): Xaa in position 364 is any amino acid
  Variant (367)..(379): Xaa in position 367 to 379 is any amino acid
  Variant (380)..(405): Xaa in position 380 to 405 is any or no amino acid
  Variant (409)..(411): Xaa in position 409 to 411 is any amino acid
  Variant (414)..(417): Xaa in position 414 to 417 is any amino acid
  Variant (419)..(427): Xaa in position 419 to 427 is any amino acid
  Variant (428)..(454): Xaa in position 428 to 454 is any or no amino acid
  Variant (456)..(457): Xaa in position 456 to 457 is any or no amino acid
  Variant (461)..(461): Xaa in position 461 is any amino acid
  Variant (464)..(464): Xaa in position 464 is any amino acid
  Variant (467)..(469): Xaa in position 467 to 469 is any amino acid
  Variant (471)..(473): Xaa in position 471 to 473 is any amino acid

SEQ ID NO: 70059 - protein, 9 aa, Artificial sequence
  Consensus
  Variant (2)..(2): Xaa in position 2 is any or no amino acid
  Variant (4)..(4): Xaa in position 4 is any or no amino acid
  Variant (6)..(6): Xaa in position 6 is any amino acid
  Variant (8)..(8): Xaa in position 8 is any amino acid
DXLXGXGXS

SEQ ID NO: 70060 - protein, 26 aa, Artificial sequence
  Consensus
  Variant (3)..(3): Xaa in position 3 is Phe or Tyr
  Variant (4)..(4): Xaa in position 4 is any amino acid
  Variant (5)..(5): Xaa in position 5 is Ala, Ser or Thr
  Variant (6)..(7): Xaa in position 6 to 7 is any amino acid
  Variant (9)..(9): Xaa in position 9 is any amino acid
  Variant (10)..(10): Xaa in position 10 is Phe, Ile, Leu, Met or Val
  Variant (11)..(11): Xaa in position 11 is any amino acid
  Variant (12)..(12): Xaa in position 12 is His or Tyr
  Variant (13)..(13): Xaa in position 13 is Asn or Pro
  Variant (14)..(18): Xaa in position 14 to 18 is any amino acid
  Variant (19)..(19): Xaa in position 19 is Ala or Leu
  Variant (20)..(23): Xaa in position 20 to 23 is any amino acid
  Variant (24)..(24): Xaa in position 24 is Pro, Gln or Ser
  Variant (25)..(25): Xaa in position 25 is any amino acid
  Variant (26)..(26): Xaa in position 26 is Ala, Gly or Ile
GGXXXXXYXXXXXXXXXXXXXXXXXX

SEQ ID NO: 70061 - protein, 12 aa, Artificial sequence
  Consensus
  Variant (3)..(3): Xaa in position 3 is Ala, Asp, Glu, Gln or Ser
  Variant (4)..(4): Xaa in position 4 is any amino acid
  Variant (5)..(5): Xaa in position 5 is Asp, Ser or Thr
  Variant (6)..(6): Xaa in position 6 is any amino acid
  Variant (7)..(7): Xaa in position 7 is Ile, Met or Val
  Variant (8)..(8): Xaa in position 8 is Asp or Asn
  Variant (9)..(10): Xaa in position 9 to 10 is any amino acid
  Variant (11)..(11): Xaa in position 11 is Ala, Gly, Ser or Thr
  Variant (12)..(12): Xaa in position 12 is Ala or Gly
YGXXXXXXXXXX

SEQ ID NO: 70062 - protein, 13 aa, Artificial sequence
  Consensus
  Variant (2)..(2): Xaa in position 2 is any or no amino acid
  Variant (4)..(4): Xaa in position 4 is any amino acid
  Variant (5)..(5): Xaa in position 5 is Ile, Leu or Val
  Variant (6)..(6): Xaa in position 6 is Phe or Tyr
  Variant (7)..(7): Xaa in position 7 is any amino acid
  Variant (9)..(9): Xaa in position 9 is Asp, Asn or Gln
  Variant (10)..(12): Xaa in position 10 to 12 is any amino acid
GXHXXXXDXXXXF

SEQ ID NO: 70063 - DNA, 327 bp, Saccharomyces cerevisiae
  CDS (1)..(327)
atggatggatcttacctcactcaccgatattgcgcgctcaagcggccctatactgcacacctattacttcttgatttttcaaaggacgaagttacaaaaaatgtttggaggtggaaaggtacggatgttaaacttcataaaatgggtagaaaaagcatcgttgctgcagtgtacaatcaagctcacccgagccatccacctctctaccatctcggtaacttgaatggtgacaaatatgtcgcctcacctcctagtcgaatgaaggcagtcagcctatcttttgcgtttactttcttatattattattttccgcttcctactaattag

SEQ ID NO: 70064 - protein, 108 aa, Saccharomyces cerevisiae
MDGSYLTHRYCALKRPYTAHLLLLDFSKDEVTKNVWRWKGTDVKLHKMGRKSIVAAVYNQAHPSHPPLYHLGNLNGDKYVASPPSRMKAVSLSFAFTFLYYYFPLPTN

SEQ ID NO: 70065 - DNA, 24 bp, Artificial sequence
  Primer sequence
atggatggatcttacctcactcac

SEQ ID NO: 70066 - DNA, 26 bp, Artificial sequence
  Primer sequence
ctaattagtaggaagcggaaaataat

SEQ ID NO: 70067 - DNA, 1704 bp, Brassica napus
  CDS (58)..(1470)
gtcgacgatttcgtcctaagttctcttatcacatcgtagatacccccgcatgtgaaaatggagagggtaaacgctagattagccgttctctctgcgcacttggaggtgtcagatcccatgccggcggcgataaagccatggtgcacatcaagtgctggtgcaccgcatggatccctaatgggaaacttgacgatcgttgatgagcgtacggggaagaagtatcaggtcccagtctctgaggatggtaccgttaaatccattgatctcaagaagataacgacagggaaagatgacaagggacttaaattatacgatccaggttacttgaacacggctcctgttcgatcttccatttcttacatcgacggagatgaaggcatcctacgttatcgtggatacccaattgaagagttggctgagaattgtacttttcttgaggttgcttacctcctcatttatgggaacctgccttcacaacgccagctagctgatttggagtttgaggtttctcagcattcagctgttccacaagggcttctagatattatccagtccatgcctcaagatgcacatccatcgggtgcttttgtcagtgcggctgcaatgagtgcactttccctcttttatcctgatgcaaatccttctcatatgggccaagatatttacaagtcaaaacaagttcgtgataaacagatatttcgtattcttggacaggcacctacgattgcagcaaatgcttttctgaggacgtcaggcaagcctcctgttcttccttcaagcaacttttcttatgcagagaacgtactctatatgctggattcaatgggcgataagtcttacaaacctaatcctcggctagctcgagtgttggacatcatcttcatactgcatgccgaacatgaaatgaactgctctactgctgctgctcggcatcttgcttcgagtggtgttgatgtgtacgctgctatttccggagctgttggagccctttatggcccacttcatggtggtgcaactgatgctgtgtctaagatgttatcagagattggaactgttgaaaacattccagacttcttccaatgcgtgaagaacaagaagaggaggttgtcaggttttggacaccgtgtttacaaaaattacgaccctcgagcaaaagtggttaaaaaactggcgtatgaagtgttctcaattgttggaaaggatccgctgattgaggtagcagttgctctagagaaggcggcactctctgatgaatattttgttaagaggaagctttaccccaatgttgatttctactctggattagtctttagggcaatgggaatcccgccacaattcattgcagttccacgtatggctggatacttggcacactggcttgagtcgttagataatcctgacactaagatcatgagaccccaacaggtctatactggagtgtggctaaggcattatgctccggtgaattgatttggattctgatcacattggtcactaaaatgggcaatagaccagacaaagaacttgcatatgtgttgtattatgtatttgtacacgttctgtaatacataaaacagaattatgatgtcgtgaatatattaatatcttttgcaaaatgaaataaaaaatattaacatattataagtgacatatataagttgtgaatgtaataaaaaagtttcttgtaccaaaaaaaaaaaaaaa

SEQ ID NO: 70068 - protein, 470 aa, Brassica napus
MERVNARLAVLSAHLEVSDPMPAAIKPWCTSSAGAPHGSLMGNLTIVDERTGKKYQVPVSEDGTVKSIDLKKITTGKDDKGLKLYDPGYLNTAPVRSSISYIDGDEGILRYRGYPIEELAENCTFLEVAYLLIYGNLPSQRQLADLEFEVSQHSAVPQGLLDIIQSMPQDAHPSGAFVSAAAMSALSLFYPDANPSHMGQDIYKSKQVRDKQIFRILGQAPTIAANAFLRTSGKPPVLPSSNFSYAENVLYMLDSMGDKSYKPNPRLARVLDIIFILHAEHEMNCSTAAARHLASSGVDVYAAISGAVGALYGPLHGGATDAVSKMLSEIGTVENIPDFFQCVKNKKRRLSGFGHRVYKNYDPRAKVVKKLAYEVFSIVGKDPLIEVAVALEKAALSDEYFVKRKLYPNVDFYSGLVFRAMGIPPQFIAVPRMAGYLAHWLESLDNPDTKIMRPQQVYTGVWLRHYAPVN

SEQ ID NO: 70069 - DNA, 1752 bp, Brassica napus
  CDS (21)..(1547)
gtcgacgatttcgtgtgaaaatggagatttctgcgagaagattggccgttctcactgcgcacttggcggtatctgatcccgtcggatcgatccaggtgttgccgccggcgatcgagccgtggtgcacatcgagtgctttaccaccgcatggatcgctcaagggaagcttgacgatcgtcgatgagcgcacggggaggaagtatcaggtcccggtatcagaggacggtaccgttaaagccgttgatctcaagaagataacgacgacggggaaggatgacaaggggcttaagttgtacgatccaggttacttgaacacggctcctgttaggtcttcgatctcttacatcgatggagatgaagggatcttacgttatcgtgggtacccaatagaagagttggctgagagcagcactttcattgaggtttcttacctcctcatgtatgggaatctgccttctcaaagtcagctagctgattgggagttcaccattcctcagcattctgctgtcccacaaggagttttggaaatcatacagtccatgcctcatgatgcacacccaatgggggttcttgtgagtgcaatgagtgcactttccatctttcatcctgatgccaaccctgctcttaggggccaagatatttacaagtcgaaacaaattcgtggtaaacagattgttcgtattcttggaaaggctccaacagttgcggcggctgcttatttgaggatggcaggcaggcctcctgttcttccttctggcaacctttcttatgctgagaatttcctctatatgctggattcaatgggcaatacgtcttacaagcctaatcctcgtctggctcgggtgctagacatcctcttcatactgcatgctgaacatgaaatgaactgctccactgctgctgctcggcatcttgcctctagtggtgttgacgtgtacaccgctgttgcgggagctgttggagcgctatacggtcctcttcatggcggtgcgaacgaggctgtccttaagatgttagcagagattgggagtgttgaaaacattccagagttcatcgaaggggtgaagagcagaaagaggaagatgtctggttttggacatcgtgtttacaaaaactacgacccgagagcaaaagtcattaagaaactggcggatgaagtgttctccatcgttggaagggatcctctgatcgaggtagcagttgctctagagaagacggcactctctgatgaatattttgtgaagagaaagctttatccaaatgtggatttctactctggattaatctatagggcaatgggattcccaccagaattcttcacagtcctgtttgcagtcccgcgtatggctgggtatttgtcacactggcgggagtctttggatgatcctgacactaagatcatgagaccccaacaggcctacactggggtgtggctaaggcattacgagccggtgagagaaagaacgttgtcaagtgattcggataagttgggtcaagtttcgatttcgaatgcatcaagaaggcgtttatctggatctgcactttagtctcaagctctcaatctttactacataccaataaaacaattgggtgacacctctgggcaaacgagaggggctcttctcaacaatctctgttgttttctttctcttctcttattatttgttattcaacatgcaccctcaataatccacttcctattggttgtctggtattttatatgatgattttaaacataaaaaaaaaaaaaaa

SEQ ID NO: 70070 - protein, 508 aa, Brassica napus
MEISARRLAVLTAHLAVSDPVGSIQVLPPAIEPWCTSSALPPHGSLKGSLTIVDERTGRKYQVPVSEDGTVKAVDLKKITTTGKDDKGLKLYDPGYLNTAPVRSSISYIDGDEGILRYRGYPIEELAESSTFIEVSYLLMYGNLPSQSQLADWEFTIPQHSAVPQGVLEIIQSMPHDAHPMGVLVSAMSALSIFHPDANPALRGQDIYKSKQIRGKQIVRILGKAPTVAAAAYLRMAGRPPVLPSGNLSYAENFLYMLDSMGNTSYKPNPRLARVLDILFILHAEHEMNCSTAAARHLASSGVDVYTAVAGAVGALYGPLHGGANEAVLKMLAEIGSVENIPEFIEGVKSRKRKMSGFGHRVYKNYDPRAKVIKKLADEVFSIVGRDPLIEVAVALEKTALSDEYFVKRKLYPNVDFYSGLIYRAMGFPPEFFTVLFAVPRMAGYLSHWRESLDDPDTKIMRPQQAYTGVWLRHYEPVRERTLSSDSDKLGQVSISNASRRRLSGSAL

SEQ ID NO: 70071 - DNA, 816 bp, Brassica napus
  CDS (8)..(697)
cccaaccatgtctccatggaaccctccaacccctcgtctcctcctcaaaaacgtctcctgcatgagaaacgcccagcagatcctccgacacgtcaacgtatccctccacgacggcggcgcgctcgtcctaaccggaaccaacggatccggcaaatcaaccttcctgagaatgctcgccgggttctcaaagccctccgcgggagaaatcctctggaacggccacgacatcacgcaatcaggggtcttccagcagtacaaactccagctcaactggatctctctgaaagacgcaatcaaggagaggttcacggtcctcgacaacgtccagtggttcgagctcctcgagaacaagatcgggaaagcgcagccggcgctggagctgatggggctagggaggctggtgaaggagaagtcgaggatgctgtcgatgggccagaggaagaggctgcagctcgcgaggctgttggcgattgataggcccatttggcttttggatgagccctccgttgcgttggatgatgaaggggttaggttgcttgagtatgttatcggggagcataggaagaaaggtgggattgtgattgttgcgactcatcttccgattgagattgaagatgctatgatcttgaggctccctcctaggtttcctaggaagatgactttgattgatatgcttgatcgtgctgacatttcttagccttagatgctatgggattgttttttgttttgtgttgttttttgttttttttgtttgtacttgtgtaatggaatcaaataatggatttgggacgagttaaacgtaaaaaaaaaaaaaaa

SEQ ID NO: 70072 - protein, 229 aa, Brassica napus
MSPWNPPTPRLLLKNVSCMRNAQQILRHVNVSLHDGGALVLTGTNGSGKSTFLRMLAGFSKPSAGEILWNGHDITQSGVFQQYKLQLNWISLKDAIKERFTVLDNVQWFELLENKIGKAQPALELMGLGRLVKEKSRMLSMGQRKRLQLARLLAIDRPIWLLDEPSVALDDEGVRLLEYVIGEHRKKGGIVIVATHLPIEIEDAMILRLPPRFPRKMTLIDMLDRADIS

SEQ ID NO: 70073 - DNA, 1211 bp, Glycine max
  CDS (111)..(893)
gaattcccgggtcgacatttcgtggcaggctgtttctggtttcaacttgttatgatggtgtcatcttctccattctcattctcattctctgtcgctcacggctagcaatcatgtcttctcgcttagatgagtgcttgttggaggtggatgggtacggtgatggcgatggaaaggcgaaacccaaattcctgataaggaatctcagcagagtttcggaggatggggttcccatcctcaaaggcataaatcttgagatcccagagggtgtgatcgtgggagtgataggccccagtggtagcggcaagtcaacgttcttgagggcccttaaccgcctctgggagccaccctccgcctccgtcttcctcgacgcccaagacatctgccatctcgatgtcctctctctccgccgtaacgttgccatgctctttcagctcccggccctctttgaaggcagcgttgcggacaatgtgaggtacggaccacaactcagagggaaaaagctaagcgatgatgaggtgcgcaagttgcttctaatggccgacctggatgcttctttcatggataagtccggggctgaactctctgtcggtcaagctcaaagagttgcacttgctaggactttagctaattcaccccaggttttgttgctggatgagccaactagtgccttagatccaatatcgacagaaaacatagaggatgccctggtgaagctgaacaagaatcagggcatgacagtcatcatggtctctcatagcatcaagcaaatccaaaggatcgctcacatagtgtgcctgcttgttgatggtgaaattgttgaagttctcaaccctcataatctctctcaggccaaccatcccatggctaagaggtttcttcaactcagttcttaaagccaagataaatctacttgcacctgctcgtttatcggccacatatatatgttcacctctcctcgattcatatctttcaatcaattatcttccacatatgttgctttaatttcaagacgtgcaggttgatgacatatatatgattttatgatagtggaggtttagttaccaatatgatattgcaaaatgctactatagaataggaatttcgtttttcaccaaaacaaaactattgtccacagttttttctatttgcaatacaaccaattggatgtaagcgtactctttggtacaagtttcgtgaaaaaaaaaaaaaaa

SEQ ID NO: 70074 - protein, 260 aa, Glycine max
MSSRLDECLLEVDGYGDGDGKAKPKFLIRNLSRVSEDGVPILKGINLEIPEGVIVGVIGPSGSGKSTFLRALNRLWEPPSASVFLDAQDICHLDVLSLRRNVAMLFQLPALFEGSVADNVRYGPQLRGKKLSDDEVRKLLLMADLDASFMDKSGAELSVGQAQRVALARTLANSPQVLLLDEPTSALDPISTENIEDALVKLNKNQGMTVIMVSHSIKQIQRIAHIVCLLVDGEIVEVLNPHNLSQANHPMAKRFLQLSS

SEQ ID NO: 70075 - DNA, 1996 bp, Glycine max
  CDS (506)..(1768)
ttgcttcacgttcccaaaagaaaaagtttaagagtattactacaataaaactaggaacttgttaagattcagaaaacattttttagttttcaattttggtttatacaattattaattttttttatttaattcaaaggtttctgaagataaaaaataaaaatacaaaaccaaacatgtcccaagtgtttctaatgttcttgtctttttgtttaggtgtactttgaatattttttggtgtactcatgttcttgtctatttcactgtttgtatcaatgtggaatgttagtaacacattctataacatattattatttcttaaaatttatctgaaactacaaaatcataaccgagactcattcaatatagagtgaaacctacaaaattcttaataagttttagtcattaataatgtgttttgctagcatttttctgatttcaaataatttaatcttagaagttagaacatcctaggaatctaacttggtttgtgtagaattagaacattatgctgttgattaagtgccaatggaatgattttctctgtctttggattctgcagcaactatctctaaaagggtttgctggagacacagccaaggctcatgcaaagacaagtatgatagcaggagagggagtgagcaacatcagaacagttgcagcattcaatgctcagaacaagatgttatcggtgttctgccacgagctccgagtgcctcagagccagagcctgcgccggagcctgacatccggcttcttgttcggtctctctcagcttgccctctatgcctccgaggctctcattctatggtatggtgcacatttggtcagcaaaggtgtttcaaccttctcaaaggtcatcaaggtgtttgtggtcctagtgatcactgcgaattcggtggctgaaaccgtgagccttgcaccggagattattcgcggtggcgaagctgttggttcagtgttctcaatcctcgatcgatcaacaagaattgaccctgatgatcctgatgctgatccggttgaatcgcttcgcggggaaattgagctcagacatgttgattttgcatacccttctaggcctgatgtgatggtgttcaaggattttaaccttaggatccgtgcaggccagagtcaggctcttgtgggggcaagtggttcggggaagagttctgttattgcattgattgagagattctatgaccttattgctggaaaagtgatggtggatggaaaggacattaggaagttgaacttgaagtctttgaggcttaaaattgggttggtgcagcaagagccagcactttttgcagcaagcattttcgagaacattgcatatgggaaagaaggtgcaaccgaggctgaggtgattgaggccgcgcgtgctgcgaacgtgcacggatttgtgagtggtttgcctgaaggttacaagacaccggttggcgagagaggcgtgcaactctctggagggcaaaagcaaaggattgccattgcaagagccgtgcttaaggaccccacaattcttctactagatgaggccacaagtgcacttgatgctgagtccgagtgtgtgctacaagaggccttggagaggctaatgaggggtcgcaccacggtgctcgtggctcatcgtttgtcaaccattagaggggttgattgcattggtgtggttcaagatgggcgcattgtggagcaaggtagccattctgaacttgtcagcaggcatgagggggcatattctagactcttgcagctacaacatcatcacatatgagaatatgagagaaagagattattgttttttttgtatttgataaatatgaccttgtgggggtgataattatgtttgggtcccattaacctcatgctttggtttttctttttttctttcttttagatgtagatatgtgggatatgaggtttgtagcttgagttcaaagtgatctatttccaatggggtatcaattattatatttaatcacatgtcaaaaaaaaaaaaaaa

SEQ ID NO: 70076 - protein, 420 aa, Glycine max
MLLIKCQWNDFLCLWILQQLSLKGFAGDTAKAHAKTSMIAGEGVSNIRTVAAFNAQNKMLSVFCHELRVPQSQSLRRSLTSGFLFGLSQLALYASEALILWYGAHLVSKGVSTFSKVIKVFVVLVITANSVAETVSLAPEIIRGGEAVGSVFSILDRSTRIDPDDPDADPVESLRGEIELRHVDFAYPSRPDVMVFKDFNLRIRAGQSQALVGASGSGKSSVIALIERFYDLIAGKVMVDGKDIRKLNLKSLRLKIGLVQQEPALFAASIFENIAYGKEGATEAEVIEAARAANVHGFVSGLPEGYKTPVGERGVQLSGGQKQRIAIARAVLKDPTILLLDEATSALDAESECVLQEALERLMRGRTTVLVAHRLSTIRGVDCIGVVQDGRIVEQGSHSELVSRHEGAYSRLLQLQHHHI

SEQ ID NO: 70077 - DNA, 1970 bp, Hordeum vulgare
  CDS (63)..(1694)
gccccaccagtcctcctcgcttccacgctcctagggtttagccgccgccgcgcctcccgagcatgtcggcgccgccctttctcaagtcccctgccaccgccgccttcctcgcctccccacgcgtgactgctgctccgagagccgccgtgctcggcgccaccgcgcagccgccacggcgcctacgctgctctgcagccgttggagccggagccagggatttcggggtgatgagtgctcccctgggctgggcggcgaggtcggtggaggagctggagcaagcgacggacctggacagtttctgtatgatggcgctatcacctctggacggccggtacatcagatttatcaaggacttgatgcccttcttcagcgagttcggtctcatcagataccgcgtcttagtcgaggtcaaatggttgctgaagctttcacaaattcctgaggtcaaggaggtgccaccgtttagccaggaggctcagctctttctggatgcagttatccaagattttagcatcaatgatgctaaagaagtgaaacaaattgagaaaataactaaccatgacgtgaaggctgttgagtactatctgaagcagaaatgcagctcaaatccagaggttgcaaaggttttggaattcttccattttggatgtacttctgaagatatcaacaacctgtcacatgcattagctctaaaagagggggtaaacacaattatgttccctgtgatgatcgatgtatgcagtgcaatatgttccttggcaacagaaaatgcacacgtccctttgttgtctaaaactcacggacagccagcatcaccaacaactctggtaaaagagatggcaaattttgcagccagattatctgatatcgggaagagtttttctgaggtcaagatactagggaaatttgctggcgctgttggaaattacaatgctgatgtagttgcatatccggaaattgactggcctaagatgacagaagagtttgtcagatccttaggtttggagttcaatccttacgttactcagattgaacctcatgactatatctcaaagctcttcaatctatttgtccagttcaacattgtcttgactgactttgacagagacatgtggtcttacatatcagcaggctacttcaagcagatagcaaaggctggtgaagttggatcctccaccatgcctcacaaaatcaatcccatcaactttgaaaatagtgaaggcaattttagtgtgtcgaatggtcttttatgtactttaagtatgaagctaccaatatcaaggttgcagcgtgatctcacagattcaactgttttgagaaacttgggtgttggattagggcattcactcttggcttacaaagcaacaatgcagggaatcaagaagctagaggtgaacaaagtccgtttggatgaagacttggagcaaacatgggaagtccttgcagagccaatacagactgtgatgcgaaggtatgggatccccgaaccctatgagaaactgaaggaaatgactagaggccaggctgtgaccaaagacagcatacgccagttcattgaaggtcttgacctaccggaggatgcccggtcaagtcttttgaagttaacaccacactcttacactggagaggcagagaatctggctgcaaatatttggaatgtggttgacctgaaatctggatttaagatcaagtgagcttctatcctggcccactattttttttgatgaggacagcgacaataacatgggggaatatctcatactccctctatacctaaataattgtagttggagaaaactagattagttctcgtcaactatatttatttaggtatggagaagtagtagcttagcgttcaaagattgtcacgctaatttatctggttctcgttgaaaaagcttgtggtgcatgtagcatgcggccttcggaattgttccattactattcgttctgccaaaaaaaaaaaaaaa

SEQ ID NO: 70078 - protein, 543 aa, Hordeum vulgare
MSAPPFLKSPATAAFLASPRVTAAPRAAVLGATAQPPRRLRCSAAVGAGARDFGVMSAPLGWAARSVEELEQATDLDSFCMMALSPLDGRYIRFIKDLMPFFSEFGLIRYRVLVEVKWLLKLSQIPEVKEVPPFSQEAQLFLDAVIQDFSINDAKEVKQIEKITNHDVKAVEYYLKQKCSSNPEVAKVLEFFHFGCTSEDINNLSHALALKEGVNTIMFPVMIDVCSAICSLATENAHVPLLSKTHGQPASPTTLVKEMANFAARLSDIGKSFSEVKILGKFAGAVGNYNADVVAYPEIDWPKMTEEFVRSLGLEFNPYVTQIEPHDYISKLFNLFVQFNIVLTDFDRDMWSYISAGYFKQIAKAGEVGSSTMPHKINPINFENSEGNFSVSNGLLCTLSMKLPISRLQRDLTDSTVLRNLGVGLGHSLLAYKATMQGIKKLEVNKVRLDEDLEQTWEVLAEPIQTVMRRYGIPEPYEKLKEMTRGQAVTKDSIRQFIEGLDLPEDARSSLLKLTPHSYTGEAENLAANIWNVVDLKSGFKIK

SEQ ID NO: 70079 - DNA, 1348 bp, Helianthus annuus
  CDS (36)..(1139)
gtcgacgatttcgtcggccactctttccgattccgatggctctgcatatcgccaaacgcctcctccgcacccgcgccaccacccctaccgtcgcacttttctcagccgttgatcggagcttttcctccacctcttccgatctgatccgcgccactctcttccccggtgacggcatcggtcccgagatcgccgaatctgttaaacaggtattcaatgctgcagaggttccaattgaatgggaagaacattttgtggggacagaagttgacccgaggacccaaagctatctcacatgggaaagtctagagtcagtaagaagaaataaagtgggcttaaaaggcccaatggctacgccaatcggaaaaggacatcgttccttaaaccttacgttgaggaaagaactgaatctgtacgcaaatgtcagaccatgttacagcttacctggttacaagactcgatatgacgatgttaatcttgttaccatccgtgaaaacactgaaggagagtacagtggtcttgaacatcaggtggtgcggggagttgtcgaaagtctcaaaatcatcactcgacaggcaagtctgagggtcgctgaatacgctttttattacgctaaaacacatggtagggagagagtatctgcagtacacaaagctaacatcatgcagaaaaccgatggtctctttttgaagtgctgtcgtgaagttgctgagaagtacccggagattaagtacgaggaagttgtcatcgacaattgctgtatgatgcttgtgaagaatccaacgctgtttgatgttttagtaatgcccaatctttatggtgacatcatcagtgatctgtgtgctggattaattggaggactgggtttaacaccaagcttaaacattggagagggtggtattgctcttgctgaggccgttcatggttcagctcctgatattgctggaaagaatttggcaaacccgaccgctttattactaagtgccgtatcaatgcttcaccatttggacctgaatgaaaaagccgataaaatccaagatgcggttttgaagacaatcgcagaaggcaagtaccgaactggcgatctaggtggccaatcaacaacctcggaatttacaaaagcgatcatcgatcatctttgagcattaaagatggtgcaaattgcatataaagtttgattccatttttcttacactaattttccattcatgtactatttggagttgtggagaggggaattagaccacaacaagattttttggttttgttatttgagtaaggatataaagataactgctcaaaagccaggttatgcagttgacatatgcttttctagaaaaaaaaaaaaaaa

SEQ ID NO: 70080 - protein, 367 aa, Helianthus annuus
MALHIAKRLLRTRATTPTVALFSAVDRSFSSTSSDLIRATLFPGDGIGPEIAESVKQVFNAAEVPIEWEEHFVGTEVDPRTQSYLTWESLESVRRNKVGLKGPMATPIGKGHRSLNLTLRKELNLYANVRPCYSLPGYKTRYDDVNLVTIRENTEGEYSGLEHQVVRGVVESLKIITRQASLRVAEYAFYYAKTHGRERVSAVHKANIMQKTDGLFLKCCREVAEKYPEIKYEEVVIDNCCMMLVKNPTLFDVLVMPNLYGDIISDLCAGLIGGLGLTPSLNIGEGGIALAEAVHGSAPDIAGKNLANPTALLLSAVSMLHHLDLNEKADKIQDAVLKTIAEGKYRTGDLGGQSTTSEFTKAIIDHL

SEQ ID NO: 70081 - DNA, 1426 bp, Brassica napus
  CDS (73)..(1173)
gtcgacgatttcgtgcaaaatatctccgactcgaatagtttcgtcgctgcgtccctttggtgctttgaagagatgaccatggcggcagcaaccttcgcgaaacgcctgatcggaagccgatctagctcaaccacagccacttccgtcgccagagctttctgctcgtccaccactccaatcaccgcaaccatgttccccggagacgggatcggtcccgagatcgccgaatccgtcaaacaggtgttcacgacggcgggagtgccgattaactgggaagagcactacgtcagcgccgagatcgatccgagaacgcagagcttcttgacctgggagagtctcgaatccgtgcgtaggaacaaagtcggtttgaaaggtccgatggcgactccgatcgggaaaggccaccgttccttgaatctgactcttaggaaagagctgaatctgtacgctaacgttaggccttgctatagtcttcctggttacaagactcgttacgatgatgtgaatctaattactattagggagaatactgagggagagtacagtgggcttgaacatcaggttgttagaggtgtggtggagagtcttaagatcattacgcgtcaggcgagtttgagagttgctgagtatgcttttcactatgctaagactcatgggagagagagagtttccgctattcataaagctaatattatgcagaaaactgatggtcttttcctcaagtgttgtcgtgaggttgctgagaagtatcctgagattacttacgaagaggttgttattgacaactgctgtatgatgcttgtgaaaaacccagcactgtttgatgtattggtgatgccaaacctgtacggtgacattattagtgacttgtgtgctggattggttggaggactaggattgactccaagttgtaatattggggaagatggtgtagctcttgctgaagccgttcacggttctgcacctgatatcgctggaaagaacttggcgaacccaacagcgttgctactgagtggagtgatgatgttgcgtcacctgaagctgaacgaacaagcagaacagatccacagcgcaatcatcaacaccatagctgagggcaaatacagaactgcagatcttggaggtagttcgaccaccacggacttcacaaaagcaatctgtgatcatctctgaacaatcgtaaaaaaatctcaattctttaacgaatctttcctttgaggcttgagcgtttattagcctctgagattcttcttgttttcctcgttttacgataagaataaaacaggcaattgcttttgaagttacattgtttcttctgcctctaaaacgtcttttaaaaaacttagattcatagcacagaaacagctgtgttgttctgtaatcaatcagaagagttttgtttttcttgctgaaaaaaaaaaaaaaa

SEQ ID NO: 70082 - protein, 366 aa, Brassica napus
MTMAAATFAKRLIGSRSSSTTATSVARAFCSSTTPITATMFPGDGIGPEIAESVKQVFTTAGVPINWEEHYVSAEIDPRTQSFLTWESLESVRRNKVGLKGPMATPIGKGHRSLNLTLRKELNLYANVRPCYSLPGYKTRYDDVNLITIRENTEGEYSGLEHQVVRGVVESLKIITRQASLRVAEYAFHYAKTHGRERVSAIHKANIMQKTDGLFLKCCREVAEKYPEITYEEVVIDNCCMMLVKNPALFDVLVMPNLYGDIISDLCAGLVGGLGLTPSCNIGEDGVALAEAVHGSAPDIAGKNLANPTALLLSGVMMLRHLKLNEQAEQIHSAIINTIAEGKYRTADLGGSSTTTDFTKAICDHL

SEQ ID NO: 70083 - DNA, 1389 bp, Brassica napus
  CDS (59)..(1150)
gtcgacgatttcgtatcatcttcccttccgatcaaactttgtcagattcaacgaaatcatgtctcgccgatcaccaactctcctgaaaaacctcgccaattcaagaacccagacccgatccgtaacctacatgcccagacccggcgacggagcgccacgcgccgtgactctaatcccgggcgacgggatcggccctctcgtgaccaacgccgtggagcaggtgatggaagcgatgcacgcgccgatctacttcgagaagtacgacgtccagggggagatgagccgcgtgccggcggaggtgatggagtcgatacggaagaacaaggtgtgcttgaaaggcgggctcaagacccccgtgggcggcggcgtgagctcgctgaacgtgcagctgaggaaggagcttgacctctttgcgtcgctggtcaactgcttcaacttgcccgggttgcccacgaggcatgagaatgttgatatcgttgtgattagggagaatactgaaggggagtatgcggggcttgagcatgaggttgttcctggcgttgttgagagtcttaaggtgatcacgaagttctgttcggagcgtatagctaagtatgcttttgagtatgcttacctgaacaacaggaagaaagtgacggcggtgcacaaggctaacatcatgaagcttgctgatggtttgttcttggagtcttgtcgtgaggttgctaaaaagtatccagggatcacatacaatgagattattgtcgataactgctgcatgcaacttgtagccaagccagagcagtttgacgtcatggtaacacccaatctctatggtaatttagttgcaaacactgccgctggtattgctggaggcaccggagtcatgcctggaggaaacgttggggctgaccatgcggtgtttgagcaaggtgcatcagcaggaaatgtcgggaaagactcgatagtaaggaaaaacaaagcaaacccagtggcgttgcttctctcatcagccatgatgcttagacatcttcagtttccttcatttgctgaccggctcgaaacagcagtgaagagagtgatctctgaagggaagtgccggactaaagatcttggtggacaaagcactactcaagaggtcgttgacgcagtcattgcaaagctggagtgacttgtgacaaaaacacttaatccctctctctccctctttctctgcataaatcatcaagtttctgctacagattttctgttgacaaaaaatatatgggtatgatccacggtggctggttttgtacctcttgagtttcatacaattcttttagacgtaaaatcgtcgaaaacttccaatcagattttgctattcccaaatagttcatgctgaatgaaagcttggtcaaaaaaaaaaaaaaa

SEQ ID NO: 70084 - protein, 363 aa, Brassica napus
MSRRSPTLLKNLANSRTQTRSVTYMPRPGDGAPRAVTLIPGDGIGPLVTNAVEQVMEAMHAPIYFEKYDVQGEMSRVPAEVMESIRKNKVCLKGGLKTPVGGGVSSLNVQLRKELDLFASLVNCFNLPGLPTRHENVDIVVIRENTEGEYAGLEHEVVPGVVESLKVITKFCSERIAKYAFEYAYLNNRKKVTAVHKANIMKLADGLFLESCREVAKKYPGITYNEIIVDNCCMQLVAKPEQFDVMVTPNLYGNLVANTAAGIAGGTGVMPGGNVGADHAVFEQGASAGNVGKDSIVRKNKANPVALLLSSAMMLRHLQFPSFADRLETAVKRVISEGKCRTKDLGGQSTTQEVVDAVIAKLE

SEQ ID NO: 70085 - DNA, 1288 bp, Glycine max
  CDS (25)..(1119)
gtcgacgatttcgtcaacagcgcaatggcacgaagatccctccctctcctaaagcacctcctcctctcgcggcggatcccggcccgatccgtgacgtacatgcaccggccgggcgacgggtctcctcggcctgtgacgctgatccctggcgacgggatcgggccgatggtgacgggcgcggtggagcaggtcatggaggccatgcatgcgcccgtctactttgagaagttcgaggtccacggccacatgaaggccgtgccgccggaggtcctcgattcgattcggaagaacaaggtctgtctcaagggtggactcgtcacccccatgggtggtggcgtcagttccctcaatgttcagcttcggaaggagcttgatctctatgcttctcttgttaattgtttcaacctccctggccttcccacgcgccatgataatgttgatattgttgtcatcagggagaacaccgaaggcgagtactccggcctcgaacacgaggtcgttcccggcgttgttgaaagccttaaggtaataacaaagttttgttcagagcgaattgctaaatatgcattcgagtatgcttacctgaataacagaaagaaggtgactgccgtgcacaaagcaaatattatgaagcttgctgatggtttattcttggaatcttgtcgagaggttgctacaaagtaccctggaatcaagtataacgaaattattgtggataactgctgtatgcagcttgtttcaaagcctgaacagtttgatgtcatggtgaccccaaatctttatggaaatctagttgcaaacactgcagcaggcattgctggaggcactggagtcatgccaggaggtaatgttggggctgagcacgctgtgtttgagcaaggtgcatcagcgggaaatgtcggtagtgataaaataagggaacaaaagaaagccaatccagtggcgcttcttctctcgtcagctatgatgcttaggcatctccagtttcctgcatttgctgaccgtttggaaactgctgtggaaaaagtcatcctggagggcaaatgccgaacaaaggatcttggagggacaagcaccacccaagaggttgtggatgcagtgatagatgctttagattgagtaatttttgttgctgatttcccaaacgaagtcagtctcgttcctttctaaccaattttgccaacattgttttgcacccatcaaatgcaaaatagtaatttttcgtcctgaataaagtttatggaacacagaaagtgataattgtttccctcctaaaaaaaaaaaaaaa

SEQ ID NO: 70086 - protein, 364 aa, Glycine max
MARRSLPLLKHLLLSRRIPARSVTYMHRPGDGSPRPVTLIPGDGIGPMVTGAVEQVMEAMHAPVYFEKFEVHGHMKAVPPEVLDSIRKNKVCLKGGLVTPMGGGVSSLNVQLRKELDLYASLVNCFNLPGLPTRHDNVDIVVIRENTEGEYSGLEHEVVPGVVESLKVITKFCSERIAKYAFEYAYLNNRKKVTAVHKANIMKLADGLFLESCREVATKYPGIKYNEIIVDNCCMQLVSKPEQFDVMVTPNLYGNLVANTAAGIAGGTGVMPGGNVGAEHAVFEQGASAGNVGSDKIREQKKANPVALLLSSAMMLRHLQFPAFADRLETAVEKVILEGKCRTKDLGGTSTTQEVVDAVIDALD

SEQ ID NO: 70087 - DNA, 1457 bp, Brassica napus
  CDS (63)..(1169)
gtcgacgatttcgtactgaagaagacgaatctgattccgatcaaaaaaacttgcagaacaagatgtctcgccgccaatctctctccctactgaagaatctcggtagattaacaaccgggtcccaaacccagacccgatccgtgacttacatgcccagacccggtgacgggaagccacgacccgtgacgttgatccccggagacggagtaggtcctctggtgacaaacgcggtggagcaagtgatggaggcgatgcacgctcccgtctacttcgagcccttcgacgttcacggagacatgaagagtttgccggaggggttgctggagtcgatcaagaagaacaaggtttgtctgaaaggagggctcaagactcccgtcggtggaggtgtgagctcgctgaatgttaacttgaggaaggagcttgatctctttgcttctttggtcaactgtttcaatttgcctgggttagagtctcggcatgagaacgttgatatagtggtgattagggagaatactgaaggtgagtatgcagggcttgagcatgaagttgttcctggtgttgttgagagccttaaggtgattacaaagttttgttccgagcgtattgcaaagtatgcgttcgagtacgcctacttgaacaacaggaagaaagttacggcagtgcacaaggccaacatcatgaaactcgctgatggtttgttcctggaatcttgtcaagaggttgctaagaagtatccaagcatcgcctacaatgagatcattgttgataactgctgtatgcaacttgtagctagaccagagcaatttgacgtcatggtgacacccaatctctatggtaatctagttgcaaacactgctgctggtattgctggaggcactggagtcatgcctggaggaaatgttggagcggagtatgcagtgtttgagcaaggagcatcagcagggaacgtggggaaggacacgacggaagagcagaagaatgcaaaccctgtggcgttgctgctctcatcagccatgatgcttaggcatcttcagttcccttcttttgctgataggcttgaaaccgcggtgaagcgtgtcatcgctgaaggaaaatgcaggactgaagatcttggcggaaagagtacaactcaagaggtcgttgatgccgtcatttcaaaattggattgagtcattcatcactcctcgagataggtggtatacatgattcacaccacgctggtctacagatgtgtacctctatttttcccacatttttttcaagataactcggaagtgggttccgtaacttccactcaaaagatactagttgatatatttttaattgggttgtcgtcaaattgcggttttgctctcccaagaagaaaggaaaggatacatacttgtatgatccttttgttattcatgtactttctgaataaatgagacttttgttaacttcttaaaaaaaaaaaaaaa

SEQ ID NO: 70088 - protein, 368 aa, Brassica napus
MSRRQSLSLLKNLGRLTTGSQTQTRSVTYMPRPGDGKPRPVTLIPGDGVGPLVTNAVEQVMEAMHAPVYFEPFDVHGDMKSLPEGLLESIKKNKVCLKGGLKTPVGGGVSSLNVNLRKELDLFASLVNCFNLPGLESRHENVDIVVIRENTEGEYAGLEHEVVPGVVESLKVITKFCSERIAKYAFEYAYLNNRKKVTAVHKANIMKLADGLFLESCQEVAKKYPSIAYNEIIVDNCCMQLVARPEQFDVMVTPNLYGNLVANTAAGIAGGTGVMPGGNVGAEYAVFEQGASAGNVGKDTTEEQKNANPVALLLSSAMMLRHLQFPSFADRLETAVKRVIAEGKCRTEDLGGKSTTQEVVDAVISKLD

SEQ ID NO: 70089 - DNA, 1364 bp, Linum usitatissimum
  CDS (61)..(1152)
gtcgacgatttcgtgcaaaaaggtcgaaaacgcaaattccacaaacacctctccgcaatcatggcgttccagcacctcatgaggcgcgctctcagaagccgccccgaccacatcctctccacttcctccgccactaggcctttctcctccgctcccattacggcaactctcttccccggcgacggtatcggccccgagatcgccgagtccgttaagcaggtgttcagggaagctgaggtaccaatacaatgggaagaacattatgttggtactgaaatagatcctagaacccagagctttctgacatgggaaagtttggagtcagtaagaagaaaccgagtgggtctgaaagggccaatggctaccccaatcggcaaaggccatcgttcattgaaccttactctcaggaaagaacttaatttgtatgccaatgtcaggccttgctacagccttcctggttacaaaaccaaatacgatgatgtgaatctcatcaccattcgtgaaaacactgaaggagaatacagtgggcttgagcaccaagtggtgagaggtgtggttgaaagtctcaagatcattactcgtcaggccagtttgagggtggccgaatatgctttctactatgcaaaggctcatggaagagagagagtgtctgccatacataaagctactatcatgcagaaaaccgatggtcttttcctcaagtgctgtcgtgaggttgctgaaaagtatcctgagattacttacgaggaggttgtcattgacaactgttgcatgatgcttgtgaaaaatccagctctttttgatgtactggttatgcctaacctctacggtgacatcatcagtgatctttgtgctggtttgattggtggtctcgggttgacaccaagctgcaatattggagaagggggaattgctcttgctgaggctgtccatggctccgcccctgacattgctgggaagaacttggctaacccaactgctctgctactgagtggtgtgtccatgctgcggcatctagaactccacgataaggcagaaaggattcagaaggccgttctgggcaccattgcggaaggcaagtaccgaacggcagatcttggtggtagctctacgacatctgattttactaaagccatctgcgaccacctttgaaggtttcccctcctgagggacaaaggaaagtttattttttttgcatcaatttgacaaacatagttttgatgtaagttctttcttcttcttcttcggcctgagtcctgagcccttgttattttccagaagagtaataaaaaaaactcatgaccattatggttacacgtcaactactttgaagttgtttcttcatcaccaaaaaaaaaaaaaaa

SEQ ID NO: 70090 - protein, 363 aa, Linum usitatissimum
MAFQHLMRRALRSRPDHILSTSSATRPFSSAPITATLFPGDGIGPEIAESVKQVFREAEVPIQWEEHYVGTEIDPRTQSFLTWESLESVRRNRVGLKGPMATPIGKGHRSLNLTLRKELNLYANVRPCYSLPGYKTKYDDVNLITIRENTEGEYSGLEHQVVRGVVESLKIITRQASLRVAEYAFYYAKAHGRERVSAIHKATIMQKTDGLFLKCCREVAEKYPEITYEEVVIDNCCMMLVKNPALFDVLVMPNLYGDIISDLCAGLIGGLGLTPSCNIGEGGIALAEAVHGSAPDIAGKNLANPTALLLSGVSMLRHLELHDKAERIQKAVLGTIAEGKYRTADLGGSSTTSDFTKAICDHL

SEQ ID NO: 70091 - DNA, 2120 bp, Zea mays
  CDS (76)..(1572)
tcgctgtcgacgatttcgtccatttcccagccgccgcggcgccacgcagacctagcagagaaacacccacccgagatggcgatggctctgcgccgccttgcgggcgtgtccggatcgccgtcggcctcctctgccgcggccacggtgctactccggtcggcgctgacccgcccgatctccaccggcttccgcgaggagcgcgacaccttcggtcccatccaagtccccaacgacaagctgtggggcgcgcagacgcagagatcgctgcagaactttgacattggcggggagcgtgagaggatgcccgttcccatcatccgtgcctttggcgtgctaaaaaagtgcgccgctaaggtgaatatggactatggccttgatccaacaatagggaaggccataatacaggcagctgaggaggtcgcagagggaaagttggatgatcacttcccacttgttatctggcaaactggcagtggcacacaaagcaacatgaatgccaatgaggtaattgcaaatagggcatctgagatccttggacacaagcgcggtgagaagtttgtgcacccaaatgaccatgtgaataggtcacaatcttcaaatgatacatttcccactgtaatgcatatagcgacggccgttgagatacattcgaggtttatcccaagtttgcaacagttgcatgattcacttcattcgaaaactattgagtttaaagacataattaaaattggacgtacacatacccaagatgccaccccattgactcttggccaagaattcagtggctacactacacaggtcaaatatggaattgaccgcattaattgtacattacctcggatgtaccagcttgctcaaggtggaactgcagttggaactggcttgaacaccaagaaaggatttgatgccaaaatagctgctgcagtggctgaggaaacaaacctaccctttgtgacagcagagaacaagtttgaagctttggcagcacatgacgcttttgttgagagcagtggtgccgtaaatacaatttctgcatctcttatgaagatagcaaacgacatacgtttgctaggaagtggtcctcggtgtggtcttggtgaactaatcctaccagaaaatgagcctgggagcagcattatgcctgggaaagttaatccaacccagtgtgaggctctgacaatggtttgtgcacaggttatgggtaatcatgttggtgttacaattggtggtgccaatgggcattttgaactgaatgtttttaagccaatgatcgcagccggattacttcgatcattgaggttgttaggggatgcatccgtgtcctttgagaaaaattgtgtcaggggaattcaagcaaaccacaagagaatttcacaacttttgcatgagtctctgatgttagtgacatctttgaaccctaaaattggctatgacaatgctgcagctgttgctaagaaagcccacaaagaaggaaccacgttgaaggaagctgcattagaccttggagtattaacggagcaagaattccatgagcttgtcgtcccggagaaaatgattggtccttctgattgataaccccatgttcactatgtttctttgaagcattcaggttgccacatccgcgagttctggtggccctgtgtttccaagttaatgattctagcgcacccataaataaagcaaataatttttcatatggtcattaggtcctcaccgtaccgcactagagaaatgatttttgcatggcggatggtatctgagaaaacagttgtattcttgttcaaatagggagcagtgcactttgattcatgaggcgccttccattatcttggcatcagtcaaccttttcttgccaagtagctagtgctatgcaacaagtgacatggcaaccatgtatagaaattatttgcatgggtttgtgttcttgccaggtagctaatgttatgtaataagtgacaaggaaacaatgccatgaattatttgcattgggttttgacgagtgaaatagaaatatacgccctgttttagttttaaaaaaaaaaaaaaaaaaaaaaaaaaaaaaaaaaaaaaaaaaaaaaaaaaaaaaaaaaaaaaaaaaaaaaaaaaaaaaaaaaaaaaaa

SEQ ID NO: 70092 - protein, 498 aa, Zea mays
MAMALRRLAGVSGSPSASSAAATVLLRSALTRPISTGFREERDTFGPIQVPNDKLWGAQTQRSLQNFDIGGERERMPVPIIRAFGVLKKCAAKVNMDYGLDPTIGKAIIQAAEEVAEGKLDDHFPLVIWQTGSGTQSNMNANEVIANRASEILGHKRGEKFVHPNDHVNRSQSSNDTFPTVMHIATAVEIHSRFIPSLQQLHDSLHSKTIEFKDIIKIGRTHTQDATPLTLGQEFSGYTTQVKYGIDRINCTLPRMYQLAQGGTAVGTGLNTKKGFDAKIAAAVAEETNLPFVTAENKFEALAAHDAFVESSGAVNTISASLMKIANDIRLLGSGPRCGLGELILPENEPGSSIMPGKVNPTQCEALTMVCAQVMGNHVGVTIGGANGHFELNVFKPMIAAGLLRSLRLLGDASVSFEKNCVRGIQANHKRISQLLHESLMLVTSLNPKIGYDNAAAVAKKAHKEGTTLKEAALDLGVLTEQEFHELVVPEKMIGPSD

SEQ ID NO: 70093 - DNA, 1726 bp, Brassica napus
  CDS (76)..(1554)
ataatttgccattttgtttgccctatcttctgcaactctccaccatctcgtctcccaaggcagaagaagaaccccatggcgatttacgtcgcatcacggcggctttccgccagaacaaccgcggcggcgctgcgttacgccactgctctgagatcttattcgacctcgttcagggaggagagggacaccttcggcccgatccaagttccttccgataagttgtggggagcccagacgcagagatcgctgcagaacttcgagatcggcggcgagcgcgagcgaatgcccgagccaatcgtccgcgcttttggcgtcttgaagaagtgcgctgccaaggttaacatggagtatggacttgatccaactattgggaaagcgattatggaagctgctcaggaagttgctgagggcaaactcaatgatcatttcccccttgttgtttggcaaactggtagtggcactcagagtaacatgaatgctaatgaggtcattgctaacagagcagctgagattcttggtcgcaaacgtggtgaaaaatgtgtccaccctaatgaccatgtcaacagatctcagtcttctaacgacactttccctaccgtcatgcacattgcagctgcaaccgagattaattcaaggctcatccctagtctgaaaactttgcataccactctcgactctaagtccttcgagtttaaagatattgtgaaaattggaagaactcacactcaagatgctactcctttgactctaggacaagaatttggtggctatgctactcaggttaagtatggacttaatcgagtcacatgcactctaccccgcctctatcagcttgcacaaggtggaactgcggttgggacaggattaaacaccaagaaagggtttgatgtaaagatagctgctgcagtagccgaagaaacaaacctgccgtttgtcactgcagaaaacaagtttgaagctctggctgcacatgatgcttgtgttgaaaccagtgggtcacttaacacaatcgccacatcgttgatgaagattgccaatgatatacgttttcttggaagtggtccaagatgtggtcttggtgaacttgttctgcctgaaaatgagccaggaagcagcatcatgcctgggaaggtaaatcctacacagtgtgaggccttgactatggtttgtgctcaggtaatgggcaaccatgtagctgtgacagttggtgagtcaaatggtcatttcgaactgaatgtatttaagccggtgattgcaagcgctctcttgcattccgtgaggttaatagcagatgcttcagcttcgtttgagaaaaactgtgtaaggggtattgaggccaacagagaaaggatctcaaagcttttgcacgagtctcttatgcttgtgacatcattgaatccgaaaatcggatatgacaatgctgcagcagttgccaagaaagctcacaaagaaggatcgacactgaaggaagcggctctgaagttaggtgttcttacttctgaagagtttgatacccttgttgttcccgagaagatgatcggtccctccgattgatgttgagccaaaagcttcattttgccatgttttattcttgataaagaggttgtaatgacaaataagcaaatccccagactcaaattttgcatttggaaggattcaattctttatgtatcacacagttacttttatgttgaataaaagagcaactatgcaaaaaaaaaaaaaa

SEQ ID NO: 70094 - protein, 492 aa, Brassica napus
MAIYVASRRLSARTTAAALRYATALRSYSTSFREERDTFGPIQVPSDKLWGAQTQRSLQNFEIGGERERMPEPIVRAFGVLKKCAAKVNMEYGLDPTIGKAIMEAAQEVAEGKLNDHFPLVVWQTGSGTQSNMNANEVIANRAAEILGRKRGEKCVHPNDHVNRSQSSNDTFPTVMHIAAATEINSRLIPSLKTLHTTLDSKSFEFKDIVKIGRTHTQDATPLTLGQEFGGYATQVKYGLNRVTCTLPRLYQLAQGGTAVGTGLNTKKGFDVKIAAAVAEETNLPFVTAENKFEALAAHDACVETSGSLNTIATSLMKIANDIRFLGSGPRCGLGELVLPENEPGSSIMPGKVNPTQCEALTMVCAQVMGNHVAVTVGESNGHFELNVFKPVIASALLHSVRLIADASASFEKNCVRGIEANRERISKLLHESLMLVTSLNPKIGYDNAAAVAKKAHKEGSTLKEAALKLGVLTSEEFDTLVVPEKMIGPSD

SEQ ID NO: 70095 - DNA, 1764 bp, Glycine max
  CDS (34)..(1521)
gttattctccggtggctccttccttccttcgccatggcgttctacgtgctctcgcgtcgtttatcagctggatccaactcaacgacgctcctcgccctgcgttttgcttcctcttccagatccttctcctcttccttcagggaagaaagagatacctttggacccattcaagttccctccgacaaattatggggagcacaaactcaaagatcgttgcagaacttcgacatcggtgggccccgcgaacgcatgcccgaacccatcattcgcgcttttggcgtcttgaagaaatgcgctgctaaggtgaacatggagtatggtcttgatcccatcgtgggagaagcaataatgcaagcggcacaagaagtagccgagggaaaactaaacgaacattttcctctcgttgtatggcaaactggcagtggcactcaaagtaacatgaatgctaacgaggttattgcaaaccgagcagcagagattcttggccataagcgcggtgggaagttcgtgcacccaaatgaccatgtcaatagatcgcagtcttctaatgatacattcccaaccgtaatgcacattgcagccacaatggaaataaactcaagactaattcccagcttgaaaaccttacacggtacactaaactcaaagtcaattgaattcaaagatattgtcaagattggacgcactcatactcaagatgcaacacctttgactcttgggcaagagtttagtgggtatactacacaagtgaagtacggtattgatcgagtaattggcactttgccgcacctgtatcagcttgcccagggtggtacagctgtagggactggattgaatacaaagaaggggtttgatgccaagatagcagcagcagtagctgaggaaacaaatctgccttttgttacggcagaaaataagtttgaggccttggctgcccatgatgcttttgttgaaactagtggagcacttaacactattgcggcttctttgatgaagattgctaatgatatacggttgttaggaagtggtccacgctgcggtcttggtgaactcattcttcctgaaaacgaaccaggaagtagtatcatgcctgggaaggttaaccctacccagtgtgaggctttgacaatggtgtgtgcccaggtcattggaaaccatgttgcagttacagtgggtggatcaaatggtcattttgagcttaatgtgttcaagccaatgactgccagttgtctcctgcattcgctgagactgcttggagattcatctgcttcctttgaaaagaattgtgtgagaggcattcaagctaatagggaaagaatttcaaaattactgcatgagtcactgatgctcgtcacatccttaaacccaaaaattggttatgacaaggcagcagcagttgccaagacagcccacaaagaggggtgtactcttaaggaagctgcattgaaactcggagtgctcagctctgaagattttgacaagcttgtggtacctgagaaaatgcttggaccgtctgattgactaactcgcaatgtttttgttctaataattccttgtttcatcatatcggctacatttgaggtagtatttttttagctacacccgttgattggtttgagaaatggcaacccaatgaacaataatttggcttcctcagttgatattcgcgagggaagagttcttccaaatttgtaacgagacaatgtattgcagaaatttactgagccaaataaagggaaattttttattcaaaaaaaaaaaaaa

SEQ ID NO: 70096 - protein, 495 aa, Glycine max
MAFYVLSRRLSAGSNSTTLLALRFASSSRSFSSSFREERDTFGPIQVPSDKLWGAQTQRSLQNFDIGGPRERMPEPIIRAFGVLKKCAAKVNMEYGLDPIVGEAIMQAAQEVAEGKLNEHFPLVVWQTGSGTQSNMNANEVIANRAAEILGHKRGGKFVHPNDHVNRSQSSNDTFPTVMHIAATMEINSRLIPSLKTLHGTLNSKSIEFKDIVKIGRTHTQDATPLTLGQEFSGYTTQVKYGIDRVIGTLPHLYQLAQGGTAVGTGLNTKKGFDAKIAAAVAEETNLPFVTAENKFEALAAHDAFVETSGALNTIAASLMKIANDIRLLGSGPRCGLGELILPENEPGSSIMPGKVNPTQCEALTMVCAQVIGNHVAVTVGGSNGHFELNVFKPMTASCLLHSLRLLGDSSASFEKNCVRGIQANRERISKLLHESLMLVTSLNPKIGYDKAAAVAKTAHKEGCTLKEAALKLGVLSSEDFDKLVVPEKMLGPSD

SEQ ID NO: 70097 - DNA, 1860 bp, Glycine max
  CDS (135)..(1622)
gctgaacaaaaatactagactattcatttggggtccaacttggaagaagactgcggaatcgcgtatcctgattggtcagacaagtgttatgctccggtgactccttccttcgccacccccactcaaattcaaccatggcgttgtacgtgctctcgcgtcgtttatcagctggatccaactcaaccacgctcctcgccttgcgttttgtttcctctaccagatcctactcctcttccttcagggaagaaagagatacctttggagccattcaagttccctccgagaaattatggggagcacaaactcaaagatcgttgcagaacttcgatatcggtgggccccgcgaacgcatgcccgaacccatcattcgcgcctttggcgtcttgaagaaatgcgctgctaaggtgaacatggagtatggtcttgatcccgccgttggaaaagcgattatgcaagcggcacaagaagtggccgagggaaaactaaacgaccattttcctctcgttgtatggcaaactggcagtggcactcaaagtaacatgaatgctaacgaggttattgcaaaccgagcagcagagattctttggcataagcggggtgggaagttagtgcacccaaatgaccatgtcaatagatcacagtcttcaaatgatacattcccaactgtaatgcacattgcagccgcaatggaaataaactcaagactaattcccagcctgaaaaccttacatggtacactaaactcaaagtcaattgaattcaaagatattgtcaagattggacgcactcatactcaagatgcaacacctttgactcttggacaagagtttagtgggtatactacacaagtgaagtatggtattgatagagtaattggcactttgccgcacatgtatcagcttgcccagggtgggacagctgtagggactggattgaatacaaagaaggggtttgatgccaaaatagcagcagcagtagctgaggaaaccaatctgccttttgttacggcagaaaataagtttgaggccttggctgcccatgatgcttttgttgaaactagtggagcccttaacactattgcggcttctttgatgaagattgctaatgacatacggttgttaggaagtggtccacgctgcggtcttggtgaactcattcttcctgaaaacgaaccagggagcagtatcatgcctgggaaggttaaccctacccagtgtgaggctttgacaatggtgtgtgcccaggtcataggaaaccatgttgcagttacagtgggtggatcaaatggtcattttgagcttaatgtgttcaagccaatgattgccagttgtctcctgcattcactgagactgcttggagattcatctgcttcctttgaaaagaattgcgtgagaggcattcaagctaacagggaaagaatttcaaaattactgcatgagtcactaatgcttgtcacatccttaaacccgaaaattggttatgacaaggcagcagcagttgccaagacagcccacaaagaggggtgtactcttaaggaagctgcattgaaactcggagtgctcagctctgaagattttgacaagcttgtggtacctgagaaaatgcttggaccatctgattgactggctcgtaatgttttgttctaattattccttgttttatcatcggctacattgaggtagtattttttagccacacccgttgataggtttgagaaatggcaatccaatgaacaataatttggcttcctcagttgatattcgcgagggaagagctcttccaaatttgtaatgagacaatgtattgcagaaatttactgacccaaataaagggaaaatttgtattcaaaaaaaaaaaaaa

SEQ ID NO: 70098 - protein, 495 aa, Glycine max
MALYVLSRRLSAGSNSTTLLALRFVSSTRSYSSSFREERDTFGAIQVPSEKLWGAQTQRSLQNFDIGGPRERMPEPIIRAFGVLKKCAAKVNMEYGLDPAVGKAIMQAAQEVAEGKLNDHFPLVVWQTGSGTQSNMNANEVIANRAAEILWHKRGGKLVHPNDHVNRSQSSNDTFPTVMHIAAAMEINSRLIPSLKTLHGTLNSKSIEFKDIVKIGRTHTQDATPLTLGQEFSGYTTQVKYGIDRVIGTLPHMYQLAQGGTAVGTGLNTKKGFDAKIAAAVAEETNLPFVTAENKFEALAAHDAFVETSGALNTIAASLMKIANDIRLLGSGPRCGLGELILPENEPGSSIMPGKVNPTQCEALTMVCAQVIGNHVAVTVGGSNGHFELNVFKPMIASCLLHSLRLLGDSSASFEKNCVRGIQANRERISKLLHESLMLVTSLNPKIGYDKAAAVAKTAHKEGCTLKEAALKLGVLSSEDFDKLVVPEKMLGPSD

SEQ ID NO: 70099 - DNA, 1479 bp, Zea mays
  CDS (1)..(1479)
atggatccatacaagcaccgcccgtctagtgggagcaactccagcttctggaccaccaactccggcgcccccgtctggaacaacaactctgccctcaccgtcggacagcgaggtccaatcctccttgaggattatcatctaatcgaaaagcttgctcagttcgacagagaacgtatccctgaacgtgttgtgcatgcacggggagccagtgccaagggtttctttgaggtcactcatgatgtctctcaccttacatgtgctgattttctccgtgctcctggggtccagacacctgttattgtccgtttctctacagttgtgcatgagcgtggaagccctgagaccttgagggatccacgtggttttgctgtcaagttctacaccagagagggtaactttgacctcgtgggtaacaacatgcctgtgtttttcatacgagatgggatgaaattccctgacatggtccacgctttcaagccgaatccaaagaccaatttgcaggagaactggagaatagtagatttcttctctcaccacccagagagcctacacatgttcaccttcctctttgacgatgttggcatcccactcaactacaggcacatggagggctttggtgtcaatacctacaccttgatcaacagggatggaaagcctcaccttgtgaaattccattggaagcctacttgtggtgtgaaatgcttgctcgacaatgaagctgtgactgttggaggcacctgccacagccatgcgacgaaggatctatatgattccatcgcagctgggaattaccctgaatggaagctctacatccagactattgatcttgaccatgaggataagtttgactttgacccgctcgatgtcaccaagacctggcctgaggatatcatcccgctgcagcccgttggacggatggtcctgaacaagaacgtcgacaacttctttgcagagaatgaacagattgctttctgcccagcgattattgttcctggaattcactattctgatgataagctgctccagacgagaatcttctcctatgctgatacccagaggcaccgccttggtccaaactatctgatgcttcctgtgaatgcaccaaaatgtgcccaccacaataaccaccatgatgggttcatgaacttcatgcacagggacgaagaggtgaactacttcccttcgaggtttgatcccgcccgtcacgcggagaaggtccccattcctccccgtgttctaacaggctgtcgtgagaagtgcatcattcagaaggagaacaacttcaagcaggctggcgagagatatcgttccttcgaccctgcaaggcaagaccggttcatccagcgatgggttgacgcactgacagaccctcgcgtgacccatgaacaccgtaccatttggatctcctactggtcccagtgcgacgccgctcttggccagaagctgccttctaggctgaacctgaagccgagcatgtaa

SEQ ID NO: 70100 - protein, 492 aa, Zea mays
MDPYKHRPSSGSNSSFWTTNSGAPVWNNNSALTVGQRGPILLEDYHLIEKLAQFDRERIPERVVHARGASAKGFFEVTHDVSHLTCADFLRAPGVQTPVIVRFSTVVHERGSPETLRDPRGFAVKFYTREGNFDLVGNNMPVFFIRDGMKFPDMVHAFKPNPKTNLQENWRIVDFFSHHPESLHMFTFLFDDVGIPLNYRHMEGFGVNTYTLINRDGKPHLVKFHWKPTCGVKCLLDNEAVTVGGTCHSHATKDLYDSIAAGNYPEWKLYIQTIDLDHEDKFDFDPLDVTKTWPEDIIPLQPVGRMVLNKNVDNFFAENEQIAFCPAIIVPGIHYSDDKLLQTRIFSYADTQRHRLGPNYLMLPVNAPKCAHHNNHHDGFMNFMHRDEEVNYFPSRFDPARHAEKVPIPPRVLTGCREKCIIQKENNFKQAGERYRSFDPARQDRFIQRWVDALTDPRVTHEHRTIWISYWSQCDAALGQKLPSRLNLKPSM

SEQ ID NO: 70101 - DNA, 1482 bp, Zea mays
  CDS (1)..(1482)
atggacccgtacaagcaccgcccgtcgagcgccttcaacgccccgtactggaccaccaactccggcgcccccgtgtggaacaacgacagctccctcaccgtcggcgcacgaggtcccatcctgctggaggactaccacctggtggagaagctagccaacttcgaccgcgagcgcatcccggagcgcgtggtgcacgcgcgtggcgccagcgccaagggcttcttcgaggtgacccacgacatcacccacctgacgtgcgccgacttcctgcgcgcgcccggggtgcagacgcccgtcatcgtccgcttctccacggtgatccacgagcgcgggagccccgagacgctgcgcgacccgcgcgggttcgccgtcaagttctacacccgggagggcaactgggacctggtgggcaacaacttccccgtcttcttcatccgcgacggcatcaagttcccggacatggtgcacgcgctcaagcccaacccgcggacgcacatccaggacaactggcgcatcctcgacttcttctcgcaccacccggagagcctgcacatgttctccttcctcttcgacgacgtcggcatccccgccgactaccgccacatggacggatccggggtgcacacgtacacgctcgtcagccgcgccggcaccgtcacctacgtcaagttccactggcgccccacctgcggcgtgcgctcgctgatggacgacgaggccgtcgccgttggcggcgccaaccacagccacgccaccaaggacctcacggacgccatcgcggcggggaacttccccgagtggacgctctacatccagaccatggaccccgagatggaagaccgcctcgacgacctggacccgctggacgtgaccaagacgtggcccgaggacgcgttcccgctgcagcccgtgggccgcctggtgctcaaccgcaacatcgacaacttcttcgcggagaacgagcagctggccttctgcccgggcctcatcgtccctggtatctactactccgacgacaagctgctgcagaccaggatcttctcctactccgacacgcagcgccaccgcctcggccccaactacctgctgctaccggccaacgcgcccaagtgcgcacaccacaacaaccactacgacggatccatgaacttcatgcaccgccacgaggaggtcgactacttcccctccaggtacgacgccgtcaggaacgcgccgaggtacccgatcccgaccgcccacatcgccggccgccgagagaagactgtgattagcaaggagaacaacttcaagcagcccggggagaggtaccgcgcgatggacccagcaaggcaagagcggttcataaccagatgggtcgacgcgctctccgacccccgcctcacccacgagatcaggaccatctggctctccaactggtctcaggccgacaggtctctgggccagaagctcgcgagccgcctcagcgccaagccgagcatgtaa

SEQ ID NO: 70102 - protein, 493 aa, Zea mays
MDPYKHRPSSAFNAPYWTTNSGAPVWNNDSSLTVGARGPILLEDYHLVEKLANFDRERIPERVVHARGASAKGFFEVTHDITHLTCADFLRAPGVQTPVIVRFSTVIHERGSPETLRDPRGFAVKFYTREGNWDLVGNNFPVFFIRDGIKFPDMVHALKPNPRTHIQDNWRILDFFSHHPESLHMFSFLFDDVGIPADYRHMDGSGVHTYTLVSRAGTVTYVKFHWRPTCGVRSLMDDEAVAVGGANHSHATKDLTDAIAAGNFPEWTLYIQTMDPEMEDRLDDLDPLDVTKTWPEDAFPLQPVGRLVLNRNIDNFFAENEQLAFCPGLIVPGIYYSDDKLLQTRIFSYSDTQRHRLGPNYLLLPANAPKCAHHNNHYDGSMNFMHRHEEVDYFPSRYDAVRNAPRYPIPTAHIAGRREKTVISKENNFKQPGERYRAMDPARQERFITRWVDALSDPRLTHEIRTIWLSNWSQADRSLGQKLASRLSAKPSM

SEQ ID NO: 70103 - DNA, 1485 bp, Zea mays
  CDS (1)..(1485)
atggatcctaccaagttccgtccgtccagcagccacgacacgacggtgacgacgacgaacgcgggcgctcctgtgtggaacgacaacgaggcgctgactgtggggcctcgcggtcccatcctgctggaggactaccacctgatcgagaaggtggcgcacttcgcgcgcgagcgcatcccggagcgcgtggtgcacgcgcgcggggcctccgccaagggcttcttcgagtgcacccacgacgtgacgtcgctgacgtgcgccgacttcctgcgcgcgcccggcgtgcggacgcccgtgatcgtgcgcttctcgacggtgatccacgagcgggggtccccggagacgatccgcgacccgcgcgggttcgccgtgaagttctacacccgcgagggcaactgggacctgctgggcaacaacttccccgtcttcttcatccgcgacggcatcaagttccccgacgtgatccacgcgttcaagcccaacccgcggtcgcacgtgcaggagtactggcgggtgttcgacttcctgtcgcacctccccgagagcctgcacaccttcttcttcctcttcgacgacgtgggcgtgccgtccgactaccgccacatggaagggttcggcgtgaacacgtacacgttcgtgagcgcggcggggaaggcgcagtacgtcaagttccactggaagccgacgtgcggcgtgcggtgcatcctgacggacgaggaggcggcgctggtcgggggacggaaccacagccacgcgacgcaggacctgtacgactccatcgcggcggggagcttcccggagtggacgctgtacgtgcaggtgatggacccggacacggaggagcagtacgacttcgacccgctggacgacaccaagacgtggccggaggacctgctgccgctccgccccgtggggaggctggtgctggacaggaacgtggacaacttcttcaacgagaacgagcagctggcgttcggcccggggctggtggtgccagggatctactactcggacgacaagatgctgcagtgccgggtgttcgcctacgccgacacgcagcgctacaggctggggcccaactacctgatgctgcccgtcaacgcgccgcgctgcgcgcaccacaacaaccactacgacggcgccatgaacttcatgcaccgcgacgaggaggtggactactacccgtccaggcacgcgccgctgcggcaggcggcgccgcccacgccactgccgcccaggccggtcgcggggaggagggagaaggcaaccatacgcaagcccaacgacttcaagcagccaggggagaggtaccgctcctgggacgccgaccgacaggaccgattcgtgaggcgattcgccgactcgctcggacacccaaaggtcagccaggagctcaggtccatctggatagacctcctcgccaagtgcgacgcgtcgctggggatgaagattgccacccggctcaacatgaagccaaacatgtga

SEQ ID NO: 70104 - protein, 494 aa, Zea mays
MDPTKFRPSSSHDTTVTTTNAGAPVWNDNEALTVGPRGPILLEDYHLIEKVAHFARERIPERVVHARGASAKGFFECTHDVTSLTCADFLRAPGVRTPVIVRFSTVIHERGSPETIRDPRGFAVKFYTREGNWDLLGNNFPVFFIRDGIKFPDVIHAFKPNPRSHVQEYWRVFDFLSHLPESLHTFFFLFDDVGVPSDYRHMEGFGVNTYTFVSAAGKAQYVKFHWKPTCGVRCILTDEEAALVGGRNHSHATQDLYDSIAAGSFPEWTLYVQVMDPDTEEQYDFDPLDDTKTWPEDLLPLRPVGRLVLDRNVDNFFNENEQLAFGPGLVVPGIYYSDDKMLQCRVFAYADTQRYRLGPNYLMLPVNAPRCAHHNNHYDGAMNFMHRDEEVDYYPSRHAPLRQAAPPTPLPPRPVAGRREKATIRKPNDFKQPGERYRSWDADRQDRFVRRFADSLGHPKVSQELRSIWIDLLAKCDASLGMKIATRLNMKPNM

SEQ ID NO: 70105 - DNA, 1485 bp, Zea mays
  CDS (1)..(1485)
atggatcctaccaagttccgtccgtccagcagccacgacacgacggtgacgacgacgaacgcgggcgctcctgtgtggaacgacaacgaggcgctgactgtggggcctcgcggtcccatcctgctggaggactaccacctgatcgagaaggtggcgcacttcgcgcgcgagcgcatcccggagcgcgtggtgcacgcgcgcggggcctccgccaagggcttcttcgagtgcacccacgacgtgacgtcgctgacgtgcgccgacttcctgcgcgcgcccggcgtgcggacgcccgtgatcgtgcgcttctcgacggtgatccacgagcgggggtccccggagacgatccgcgacccgcgcgggttcgccgtgaagttctacacccgcgagggcaactgggacctgctgggcaacaacttccccgtcttcttcatccgcgacggcatcaagttccccgacgtgatccacgcgttcaagcccaacccgcggtcgcacgtgcaggagtactggcgggtgttcgacttcctgtcgcacctccccgagagcctgcacaccttcttcttcctcttcgacgacgtgggcgtgccgtccgactaccgccacatggaagggttcggcgtgaacacgtacacgttcgtgagcgcggcggggaaggcgcagtacgtcaagttccactggaagccgacgtgcggcgtgcggtgcatcctgacggacgaggaggcggcgctggtcgggggacggaaccacagccacgcgacgcaggacctgtacgactccatcgcggcggggagcttcccggagtggacgctgtacgtgcaggtgatggagccggacacggaggagcagtacgacttcgacccgctggacgacaccaagacgtggccggaggacctgctgccgctccgccccgtggggaggctggtgctggacaggaacgtggacaacttcttcaacgagaacgagcagctggcgttcggcccggggctggtggtgccagggatctactactcggacgacaagatgctgcagtgccgggtgttcgcctacgccgacacgcagcgctacaggctgggtcccaactacctgatgctgcccgtcaacgcgccgcgctgcgcgcaccacaacaaccactacgacggcgccatgaacttcatgcaccgggacgaggaggtggactactacccgtccaggcacgcgccgctgcggcaggcggcgccgcccacgccactgccgcccaggccggtcgcggggaggagggagaaggcaaccatacgcaagcccaacgacttcaagcagccaggggagaggtaccgctcctgggacgccgaccgacaggaccgattcgtgaggcgattcgccgactcgctcggacacccaaaggtcagccaggagctcaggtccatctggatagacctcctcgccaagtgcgacgcgtcgctggggatgaagattgccacccggctcaacatgaaggcaaacatgtga

SEQ ID NO: 70106 - protein, 494 aa, Zea mays
MDPTKFRPSSSHDTTVTTTNAGAPVWNDNEALTVGPRGPILLEDYHLIEKVAHFARERIPERVVHARGASAKGFFECTHDVTSLTCADFLRAPGVRTPVIVRFSTVIHERGSPETIRDPRGFAVKFYTREGNWDLLGNNFPVFFIRDGIKFPDVIHAFKPNPRSHVQEYWRVFDFLSHLPESLHTFFFLFDDVGVPSDYRHMEGFGVNTYTFVSAAGKAQYVKFHWKPTCGVRCILTDEEAALVGGRNHSHATQDLYDSIAAGSFPEWTLYVQVMEPDTEEQYDFDPLDDTKTWPEDLLPLRPVGRLVLDRNVDNFFNENEQLAFGPGLVVPGIYYSDDKMLQCRVFAYADTQRYRLGPNYLMLPVNAPRCAHHNNHYDGAMNFMHRDEEVDYYPSRHAPLRQAAPPTPLPPRPVAGRREKATIRKPNDFKQPGERYRSWDADRQDRFVRRFADSLGHPKVSQELRSIWIDLLAKCDASLGMKIATRLNMKANM

SEQ ID NO: 70107 - DNA, 1211 bp, Glycine max; identical to SEQ ID NO: 70073
  CDS (111)..(893)

SEQ ID NO: 70108 - protein, 260 aa, Glycine max; identical to SEQ ID NO: 70074

SEQ ID NO: 70109 - DNA, 1996 bp, Glycine max; identical to SEQ ID NO: 70075
  CDS (506)..(1768)

SEQ ID NO: 70110 - protein, 420 aa, Glycine max; identical to SEQ ID NO: 70076

SEQ ID NO: 70111 - DNA, 1508 bp, Hordeum vulgare
  CDS (45)..(1391)
cccacctctactgagaggaagcagcagcagtggcagcggcagcaatggcagcagcagccgctctccagtgctgccctctactgagctcaccgctggcatcatccgtctcgccgccttcctccgtaagaacaccggcagttagcaggacaggggaggccaggaggaggaggaggctgcagcgatgccgctgttcccagtctgccgaggggcgatcaccgggtagctcgccgccgcagctggagcgcctcttctccaatgtcaacaaggcaaccatgaagcacgagccagggagtatcactggttccatcttccttgtggccgggacaacggtcggggcaggtatccttgcgatccccgccgtcacacaagaagctggattcttggcctcagcagtcacatgcattttctgctgggcatatatggttataacagggctgttagttgctgaagtaaacgtcaatacaatgtgtgagctaggatctggaggtgtctccctggtttcgatggctaagcgcactctagggacagttggagtaagaacagcctgcttttcatatttgtttatacattatgcacttcttgttgcgtatgtggcacgatcttcagagatcttaacaaactcattgggcattccattatgggagagtgccaccctattttcgctggcttttgggggtctatgctacttcggaagtcagagagtcattggtgccgtgaatggctttttggtgttcagtatcataacatccttcacagctcttgtggtggtggcaagtggaaatatacagtggagttctcttcttgaaacgaattttgctgctgctccccaaagtataccaataattgctctttcattcgtatatcagaatgtagttcctgtcctgtgtacaaatttggaaggagacctgtcaaaagtaagaaaggccattgtattaggtactgccataccccttgctctgtttctcatatgggatgctgtcatcctggggacaatcccggggtttgcagaaagtggggctgttactgatccgttacaacaacttaggtcaagcaatggtacagtggggcctatcgttgaggcattctcatttctggcaataggcacatcatacattggatttgttctaggactctcagacttcatcgcggactatccagagatatttttcaaggcattggactttgcaggaacttatggagttctagtactctttggagttttccctgcagctatgtcttggtcagagagatactcaaatgacttggaagctcctatatcccctatagtcccaggaggaaaattaaccctctcatttgttatggggggtgccttgcttgtaatattttcggagattttcaaggacataatgcagctgcaaggactacattgacaattacaacgtgcaaagttcaactactgatgcttctgcagattttggtccaatgtattaacacacccaaaataaactaatccagtatttctagcttttcttaaaaaaaaaaaaaaa

SEQ ID NO: 70112 - protein, 448 aa, Hordeum vulgare
MAAAAALQCCPLLSSPLASSVSPPSSVRTPAVSRTGEARRRRRLQRCRCSQSAEGRSPGSSPPQLERLFSNVNKATMKHEPGSITGSIFLVAGTTVGAGILAIPAVTQEAGFLASAVTCIFCWAYMVITGLLVAEVNVNTMCELGSGGVSLVSMAKRTLGTVGVRTACFSYLFIHYALLVAYVARSSEILTNSLGIPLWESATLFSLAFGGLCYFGSQRVIGAVNGFLVFSIITSFTALVVVASGNIQWSSLLETNFAAAPQSIPIIALSFVYQNVVPVLCTNLEGDLSKVRKAIVLGTAIPLALFLIWDAVILGTIPGFAESGAVTDPLQQLRSSNGTVGPIVEAFSFLAIGTSYIGFVLGLSDFIADYPEIFFKALDFAGTYGVLVLFGVFPAAMSWSERYSNDLEAPISPIVPGGKLTLSFVMGGALLVIFSEIFKDIMQLQGLH

SEQ ID NO: 70113 - DNA, 1574 bp, Linum usitatissimum
  CDS (96)..(1547)
ctcgccttctcgtttctccgtcctccagtcttctcccgccgccgtttctgttttggacttcaattcttcgatcgacagctacgttgccggacaggatgccggaggaaaccgactccatcgactatgccatggagaaggcctctggtcctcacttctccggccttcgcatcgacagcctcctttcttcccctcctgcttcttccacttcatctcctgctcatcgttcttctcctaccgctgctggttctgttttcgctgacgccaatgctctcaggcagcccttcgtcattggggtttctggaggtaccgcttcggggaagactacggtgtgtgacatgatcattcagcagctccacgatcaccgtgttgtgcttgtcaatcaggattcattctatcgtggattgacgcctcaagaactagaacgcgttcacgaatacaacttcgatcatccagatgcatttgacactgaccagcttttggactgcgttgaaacacttaagcgtgggcttccttatcaagtccctatatatgacttcaagacccatcagcgttgttcagatagctttaggcaggtgaatgcttctgatgttattatattagagggtatattggttttccatgatcaacgtgttcgcaagcttatgaatatgaagatctttgttgatacagatcccgatgtgaggcttgctcgcagaattcggcgtgacactgttgagaggggtagagatataaactctgttcttgagcagtatgctaaatttgtgaagcctgcttttgatgatttcgtacttccttcgaaaaagtatgccgatgtgatcatacctcgtggaggtgataatcatgttgccattgatttgatagttcagcatatccagacgaagcttggtctacatgacctctgcaaaatatatccaaatgtgtatgttattcaaacaacttttcagattagaggcatgcataccttgattcgagacagggaaatttcaaagcatgattttgttttttactcggatagacttattcggctggttgttgaacatggccttggtcatttgccattcacggagaagcaagttgttacccctaccgggtcagtttatactggcgttgacttctgcaaaaaattatgcggagtttctatcgtacgaagtggagaaagcatggaaaatgcattgcgtgcatgttgcaaagggataaaaattggtaaaattttaatccacagggatggcgacaacggaaagcagcttatatatgagaagcttccaaacgacatttccgaaaggcacgtcctgcttctagatcctgttcttgccactggtaactcggccaaccaagcaatcgatctactcatacagaaaggagttccagaatcccatattatattcttaaacctaatctctgcacccgaaggcatccactgcgtctgcaagagttttccatctcttaaaatcgtgacttctgaaatcgatatagcaataaacgacgaatttcgggttgtacctgggctgggagagttcggtgatcggtactttgggactgatgattgattgaagcaactaactgaggattttctg

SEQ ID NO: 70114 - protein, 483 aa, Linum usitatissimum
MPEETDSIDYAMEKASGPHFSGLRIDSLLSSPPASSTSSPAHRSSPTAAGSVFADANALRQPFVIGVSGGTASGKTTVCDMIIQQLHDHRVVLVNQDSFYRGLTPQELERVHEYNFDHPDAFDTDQLLDCVETLKRGLPYQVPIYDFKTHQRCSDSFRQVNASDVIILEGILVFHDQRVRKLMNMKIFVDTDPDVRLARRIRRDTVERGRDINSVLEQYAKFVKPAFDDFVLPSKKYADVIIPRGGDNHVAIDLIVQHIQTKLGLHDLCKIYPNVYVIQTTFQIRGMHTLIRDREISKHDFVFYSDRLIRLVVEHGLGHLPFTEKQVVTPTGSVYTGVDFCKKLCGVSIVRSGESMENALRACCKGIKIGKILIHRDGDNGKQLIYEKLPNDISERHVLLLDPVLATGNSANQAIDLLIQKGVPESHIIFLNLISAPEGIHCVCKSFPSLKIVTSEIDIAINDEFRVVPGLGEFGDRYFGTDD

SEQ ID NO: 70115 - DNA, 1640 bp, Brassica napus
  CDS (45)..(1496)
gttttcttctccgcagacctaatcggaatttcgccgcgaatccaatgcctgaagactctacgtcgattgactacgtcatggagaaggcatcggggcctcacttctccggtcttcgcctcgacggccttctctcttctccgtccaaatccaccaactcttccccttctcccttccgttccggcgttccatctttctcccagatttccgatcccgccgcgcctaatcagcctttcgtcatcggagttactggtggtacagcttctggtaagaccacggtgtgtgacatgattatccagcagcttcatgatcatcgcattgttctagttaaccaggattccttttaccgtggtctgacatctgaagaactggagcgtgcgcaagaatacaacttcgatcatcctgatgcatttgacactgaacagcttttgcattgcatcgatacactcaagagtgggcaaccctatcaaattccaatttacgacttcaagacccatcaacgtaaatcagatgcttttcgccaggtcaatgcttgcgatgtcataattttggaagggattctagtttttcatgactcacgagttcgggatctgatgaatatgaagatcttcgttgacacagatgctgatgtgaggcttgctcgcagaatcagacgtgacactgttgagaggggtagggatgttgattctgtccttgaacagtatgcaaagtttgtgaagcctgcgtttgatgattttgtgctgccttcaaagaaatatgccgatgtgatcattcctcgaggaggtgacaatcacgttgcagttgatttgattgtgcaacatatccacacaaaacttgggcaacatgatctctgcaaaatctacccaaatctttttgttatccaatcgacatttcagataagaggcatgcatacacttattcgagagaaggacatatcaaaacatgactttgtgttttactcagatcgactcattcgtctggttgtagagcatggtcttggccatttgccattcactgagaaacaagtagttactccaacaggatctgtgtatagcggtgttgatttctgcaagaaactttgtggggtctcaatcattcgaagtggtgaaagcatggaaaacgcgttacgtgcatgttgtaaagggatcaaaatagggaagattcttattcatcgtgaaggcgacaacggaatgcagcttatatatgagaagcttccaagtgatatctccgagcgccatgtcctgcttctagatcccgttttaggcacaggtaactgtgcaagtcaggcgatagagctactcatacgtaaaggagtccctgaatctcacataatattcctcaatcttatctcggctccggaaggaatccactgcatctgcaaacggtttccgctgttgaagattgtgacatcggaaatagatcagtgtctgaatgaagactttcgggttataccaggcttgggtgaatatggcgatcgctactttggtactgacgagtaaaactagttactaatctctggtttcaaaatccggtgtaatggttgttgtgtctttgtctgcggaagcataaaattgcgacaatgttatcaaaacatgaaccataaagggaaatattgtttgtttttttttaaaaaaaaaaaaaaa

SEQ ID NO: 70116 - protein, 483 aa, Brassica napus
MPEDSTSIDYVMEKASGPHFSGLRLDGLLSSPSKSTNSSPSPFRSGVPSFSQISDPAAPNQPFVIGVTGGTASGKTTVCDMIIQQLHDHRIVLVNQDSFYRGLTSEELERAQEYNFDHPDAFDTEQLLHCIDTLKSGQPYQIPIYDFKTHQRKSDAFRQVNACDVIILEGILVFHDSRVRDLMNMKIFVDTDADVRLARRIRRDTVERGRDVDSVLEQYAKFVKPAFDDFVLPSKKYADVIIPRGGDNHVAVDLIVQHIHTKLGQHDLCKIYPNLFVIQSTFQIRGMHTLIREKDISKHDFVFYSDRLIRLVVEHGLGHLPFTEKQVVTPTGSVYSGVDFCKKLCGVSIIRSGESMENALRACCKGIKIGKILIHREGDNGMQLIYEKLPSDISERHVLLLDPVLGTGNCASQAIELLIRKGVPESHIIFLNLISAPEGIHCICKRFPLLKIVTSEIDQCLNEDFRVIPGLGEYGDRYFGTDE

SEQ ID NO: 70117 - DNA, 2318 bp, Glycine max
  CDS (128)..(2110)
gaattcccgggtcgacttcgctgtcgacgatttcgtcttgacttgaactcaggcatctctattcctcttaatattatattattattattccaagagcacatgacttgaacatctttggcttcccctaatggcacaagatactgtttctggagttgactcgcctcggggacgtctattacgagatcaggttcaagtggttaaaaaaaaggattctgatcgctatgaaattgttcctatccaagattctttgtcatttgagaaaggattcttcatatttatccgtgcatgccagttgttggctcaaaagaatgatggaatcatattagtaggagttgcaggtccatctggagcagggaaaactgttttcaccgagaaggtcctcaattttatgccaagcatagctgtcataacaatggacaattataatgattctagtagaattattgatggaaacttcgatgaccctcggttgacagattatgataccctgctcgaaaatatacagggtcttaaagcagggaagcctgttcaagttccaatatacgatttcaagtctagttctcgcataggttacaggactgttgaagtccctggctctcgtattgtaatcatagaaggcatctatgccttaagtgaaaaattacgacctttgcttgatcttcgtgtttctgtcactggtggagttcattttgatcttgtcaagcgtgttttgcgggacattcatcgtgccggtcaagagcctgaagaaataattcatcaaatctctgaaacggtgtatcctatgtataaagcttttatcgagccagatctccaaacagcccatttaaaaattattaacaagtttaatccattctctggatttcagaatcccacctacatattgaagtcagcaagaactgtgacagttgatcaaataaaggcagttattgctgcagagcatactgaaactaaagaggaaacatatgacatatttcttctaccccctggggaagaccccgaagcttgtcaatcatatttgagaatgagaaaccgtgatggaaagtacaatctcatgtttgaggaatgggtgacagatagtccattcataatatcacctagaattacttttgaagtcagcgtgcgccttcttggagggctgatggccttgggatacacaattgcagctattctgaaaagaagcagccatgtctttcatgatgataaagtgaccataaaaactgattggctagaacaacttaatcgcacatatgttcaggtgcaagggaaagacagaaactattgcaaattttttgcagagaaactggggttggatggttcctatgttcctcgcacttacattgaacaaattcagctagaaaagcttgtaaacgatgtgatggcattgccagatgatcttaagacaaaactcagcatagatgatgacttggtttcaagccccaaagaagccctttccagagcttctgcagataggagaatgaagtatcttaatcgcggtatttcacaatcctattcaactcaaagggacaagattctacctaagctgactaaacttgctataaataacagaagatttgatggaagagcactagaatcccctgcaccaattgctaaccaaggagtcatcactcaactttctgatcaaatttcaacattaaatgaaagaatggatgaattcacctcccgtattgaagagctgaattcaaagttcgctatcagaaaagattcagcaggcagtcaacaaaacttggctttacaggctgaggcctgcaatggctcaggccccacttccttctttgtaactggacgaggcaatggttcattgactggatcattgctacctaattcatcatcatcttctcagttggctaaagagtctcccctgatggaagaggtattagtgattgcacgaggacaacgtcaaatcatgcatcaactagacactctgagcaatcttttgcatgaatactttggagaaaggtcacgcctgggaagaccagaccatacaggaagaatgcgtgaagctgaatccgtcgccgtccccctgcttctgactctggccattggtgctgttggtgtgcttttgttcagaggtttgacatcccaaaaataatgtgcatatattttgtttcttgtaaaattgtcattaccatttaggagagaagcctcataagtatatctaatgcataaagggtttatgaaaacaattgccaatctgtgaggggctgcctcacattaagtggtagtagtagtggacgacgaccttaataggtatattttggcattcacttaagctgtaatatacgacacgcagcggccgc

SEQ ID NO: 70118 - protein, 660 aa, Glycine max
MAQDTVSGVDSPRGRLLRDQVQVVKKKDSDRYEIVPIQDSLSFEKGFFIFIRACQLLAQKNDGIILVGVAGPSGAGKTVFTEKVLNFMPSIAVITMDNYNDSSRIIDGNFDDPRLTDYDTLLENIQGLKAGKPVQVPIYDFKSSSRIGYRTVEVPGSRIVIIEGIYALSEKLRPLLDLRVSVTGGVHFDLVKRVLRDIHRAGQEPEEIIHQISETVYPMYKAFIEPDLQTAHLKIINKFNPFSGFQNPTYILKSARTVTVDQIKAVIAAEHTETKEETYDIFLLPPGEDPEACQSYLRMRNRDGKYNLMFEEWVTDSPFIISPRITFEVSVRLLGGLMALGYTIAAILKRSSHVFHDDKVTIKTDWLEQLNRTYVQVQGKDRNYCKFFAEKLGLDGSYVPRTYIEQIQLEKLVNDVMALPDDLKTKLSIDDDLVSSPKEALSRASADRRMKYLNRGISQSYSTQRDKILPKLTKLAINNRRFDGRALESPAPIANQGVITQLSDQISTLNERMDEFTSRIEELNSKFAIRKDSAGSQQNLALQAEACNGSGPTSFFVTGRGNGSLTGSLLPNSSSSSQLAKESPLMEEVLVIARGQRQIMHQLDTLSNLLHEYFGERSRLGRPDHTGRMREAESVAVPLLLTLAIGAVGVLLFRGLTSQK

SEQ ID NO: 70119 - DNA, 1771 bp, Glycine max
  CDS (278)..(1501)
gaattcccgggtcgacttcgctgtcgacgatttcgtccaaaacaaggggtagtcacagaaacacataaacaagaagacacccaccaatattttgctttctcttttcttttcctgcttataactgccttttgttttggtttttaattccacctcatattttatatgtgttccaaacttcttcttggaatgtcccttccttaatacccctcaaagaaaagccaccttaacatctcttctctgaaaattctctttagagagatagagagaggaagaaagaatggcagcttgcactgtctactcaacacaatctctgagcacaaattgctccatctcaaccccatcaaagacgcaactcagttttttccaccaaaagcaggtagttttctggaggaacagcaagaagggcagctgcagcagcagaagaagctatgtgataacatgtgcagcaggtgactcacagacagtggtgattggcctggctgcagactcagggtgtgggaagagcaccttcatgaggaggctgaccagtgtgtttggaggagcagcagagccaccaaagggtggcaaccctgactccaacactctcatcagtgacaccaccactgtcatatgcttggatgattaccactctttggacagaactggaagaaaggagaagggtgtcactgcccttgaccctagagccaatgattttgatctcatgtatgaacaagttaaagctcttaaggatggaattgctgttgaaaaaccaatctacaaccatgtcactggtctcttggatccccctgagctcattaaaccccccaaaatcttagtcattgaaggtttgcacccaatgtttgattcccgtgtcagagatctcttggactttagcatctacctagacattagcaatgaggtcaaattcgcttggaaaattcagagagacatggcagagcgtggacacagtcttgaaagcatcaaggctagcattgaagcaaggaagcctgattttgaagcatatattgatccacaaaagcaatacgcagatgcagtgatagaagtgttgccaacgcaactcattccagatgacaacgagggtaagattttgagagtgagattgatacagaaagagggggttaagtactttagcccggtttacttgtttgatgatggctctaccatttcatggataccatgtggaagaaagcttacatgctcctaccctggcatcaaattcttctatggacctgagacttactacggaaatgaggtgtcagttgtagaaatggatggacaatttgacagactagatgaactaatatacgttgagagccacctaagcaacctctctacaaagttctatggagaggttactcaacagatgttgaagcatgctgattttcccggcagcaacaatggaacaggtctcttccaaaccatagttggtttgaagataagagatctatatgagcagctaatagccagcaaggctgagactccagtagctgcaaaagcttaggaattgaacctgccataatatatatacatatatcgatcgagcaacgcagccaaattgagttctctcatcatcaaaatcatcattttctttcttctttcatgttttccacaattccactctatttcatgttattttgtcaattgttattaggctgttctgcatgataattaatgaaaaaaacactatgtatgtatgtacttacccgagaagaaaaagcgaggctgagattcagttatgttgatacaagattgagacaaaaaaaaaaaaaaa

SEQ ID NO: 70120 - protein, 407 aa, Glycine max
MAACTVYSTQSLSTNCSISTPSKTQLSFFHQKQVVFWRNSKKGSCSSRRSYVITCAAGDSQTVVIGLAADSGCGKSTFMRRLTSVFGGAAEPPKGGNPDSNTLISDTTTVICLDDYHSLDRTGRKEKGVTALDPRANDFDLMYEQVKALKDGIAVEKPIYNHVTGLLDPPELIKPPKILVIEGLHPMFDSRVRDLLDFSIYLDISNEVKFAWKIQRDMAERGHSLESIKASIEARKPDFEAYIDPQKQYADAVIEVLPTQLIPDDNEGKILRVRLIQKEGVKYFSPVYLFDDGSTISWIPCGRKLTCSYPGIKFFYGPETYYGNEVSVVEMDGQFDRLDELIYVESHLSNLSTKFYGEVTQQMLKHADFPGSNNGTGLFQTIVGLKIRDLYEQLIASKAETPVAAKA

SEQ ID NO: 70121 - DNA, 2096 bp, Triticum aestivum
  CDS (110)..(1852)
gaattcccgggtcgacttcgctgtcgacgatttcgtgagcgcggactgtttccctccccacttccccagtcacgaggcctagggttcgtaggtgggtccacttgcttacatggcctctatggttgccgccgcgcgcctcgccggcggggtctcgcggctgtcggctcagggttctactgcccggggccttccgcccggcagccttcgacttcccccgccgcgccggcgtctgcgcagcagcgtccggtgctgcgtggttcgccatcccggcggcggcggcggcgtggacgcgggggaggagttcgtcgggttcttccgggaggcgtggccgtacatacggggccatcgtgggagcaccttcgtggtcgttatatccagcgaggttgtgtcggggccacacttggaccgcattttgcaggatatttcactacttcatggtcttggcattaactttgttcttgttccgggaacacatgtccagattgataaactattgtcagaaagaggaaggaaggctaagtatgttggtcagtaccgagttaccgattctgattcactagaagctgcgatggaggcagctggcagaataaggttaacaatagaagcaaagctctctcctggccctccaatgttaaacctccgtagacatggtgttattggtcattggcatggtcttgtggataatgttgcaagtggcaatttccttggtgctaagagaagaggggtagttcatggtgttgattacggatttactggtgaagttaagaaaatagatgttgcacggataaaagaaaggcttgatagtgatagcattgttgttgtgagcaatatgggatactcgagctcaggagaagttctaaattgcaacacttacgaagtagccaccgcatgtgccttagccatagaggcggataaacttatctgcgttgtggacggtcagatatttgatgagaatggacgagtcattcatttcatgtctctggaggaagctgatatgttgatcagaaagcgtgctaagcaaagtgatattgctgcaaattatgtcaaggttgttgatgaggaggaccatgaaccatctttgaacggaaaggggcatcttaatgggtacgctgcttcttttcaaaacggtttgggttttaacaatggaaatggtatttgttctggtgagcaagggtttgctattggtggtgaagagcgattaagcaggtcaaatggctatctttctgagttggctgcagctgcttatgtatgccatgctggtgttcaaagagtgcatatcatagatggtacagttgatggatcactgctattagagttgtttacaagagatggtgctgggacaatgattgcgagggatgtttatgaaggaacaagaatggcgacggaggaagatcttcctggcataagaaaacttatctacccactagaggaatctggtgttttagtgcgaagaacagataaagagcttcttgaagcgttgtattcattctatgttgttgaaagagatggttcagtaattgcatgtgctgctctctttccatttcccgaggacaaatctggtgaagttgctgcaattgctgtatctgaagaatgccgaggaagaggtatgggggataagttgcttgattacattgagaaggaggcattatcccttggtcttggcaaattgttcttgcttactacacggacagccgattggtttgtgcgacgtggcttctcagagtgttcgattgaatctattcctgagcagagaagaaaacgcatcaatctgtcacgtggatcaaaatattatataaagcagctccagccaaagcatgctggtgtccctgtcaacaattttgctggcagatgatagggcttccaagaatttttgtgagagtgagacgagatatctgcactggttacatcaaggcttttatatatgttattagttgtaatttcagatagaaatataactgcagcctgtgatagcggcttaaattttttctcttttacttatggatgtaaaaaaggcactttgtgacacaacagaaaacaaatatcagaggaatttctatacagaaaccatctgcaagcagtataaaaaaaaaaaaaaa

SEQ ID NO: 70122 - protein, 580 aa, Triticum aestivum
MASMVAAARLAGGVSRLSAQGSTARGLPPGSLRLPPPRRRLRSSVRCCVVRHPGGGGGVDAGEEFVGFFREAWPYIRGHRGSTFVVVISSEVVSGPHLDRILQDISLLHGLGINFVLVPGTHVQIDKLLSERGRKAKYVGQYRVTDSDSLEAAMEAAGRIRLTIEAKLSPGPPMLNLRRHGVIGHWHGLVDNVASGNFLGAKRRGVVHGVDYGFTGEVKKIDVARIKERLDSDSIVVVSNMGYSSSGEVLNCNTYEVATACALAIEADKLICVVDGQIFDENGRVIHFMSLEEADMLIRKRAKQSDIAANYVKVVDEEDHEPSLNGKGHLNGYAASFQNGLGFNNGNGICSGEQGFAIGGEERLSRSNGYLSELAAAAYVCHAGVQRVHIIDGTVDGSLLLELFTRDGAGTMIARDVYEGTRMATEEDLPGIRKLIYPLEESGVLVRRTDKELLEALYSFYVVERDGSVIACAALFPFPEDKSGEVAAIAVSEECRGRGMGDKLLDYIEKEALSLGLGKLFLLTTRTADWFVRRGFSECSIESIPEQRRKRINLSRGSKYYIKQLQPKHAGVPVNNFAGR

SEQ ID NO: 70123 - DNA, 1956 bp, Brassica napus
  CDS (98)..(1870)
tgggtcccacttaccgccgccgtctcccgccggtttaaattcattttctatggaatcttaattgatttcttctaaaacgaagcagtgcaagtaaaaaatgatggagcagggagctttgttgcgttctgcgtcttttcaattacgccgaacgaggaacgatctttcgtctttcaagccggaaaataagttaaaccctggtcaaatccggtttaggtttaaaccggttggttccgtggcggcgaaatgcaatacgtacaacagctacgcggcgagtggaggcggcgacgcgggggctgagcatccagtggacgacaaagagttcgtgcgctggttccgtgaagcttggccttatctgtgggcccacggtggctgcactttcgtcgttgtcatctccggcgatatactcgccggcccttactgtgatcccattttaaaggacatagcgtttctccatcatcttgggataagattcgttctagttccaggaacacaagtgcaaatcgaccagcttctgtctgaaagaggacgcgaggctacatatgtgggacgttacagagtaacagacgcagcatcgttgcaagccgccacggaagctgcgggagctatctcagtgatgcttgaggctaaactatctcctggaccttccatttgcaatatccgtaggcatggtgatagtagtcgtttgcatgatataggtgtcagggttgataccggcaacttctttgcagcgaaaaggagaggcgttgttgatggtgttgattttggagcgactggtgaagtgaagaagatagatgttgaccggatttgtgagaggcttgacggtggttctgtagtcttgttgaggaacttgggtcactctagctccggagaagtcttaaattgcaatacctatgaggttgctacagcttgtgcattagctataggagcagataagcttatttgcataatggacggtccaattcttgatgagagtggacatcttattcgtttcttgacactccaagaagcagatacgttagtgagaaaacgtgtacagcaaagcgacattgctgctaactatgtaaaggctgttggtgatggaagcatggcttatcaagaacctcctggtaacgggagagcagcgttttggggaaacgggaaccacactccgatctttcaaaacggtgttggatttgacattgggagtgggttagggtctggtgagcaaggctttgctattggtggtgaggagagactaagccgccaaaacggttatctttccgaactggctgctgctgcttttgtctgcaggggtggagttaaaagagttcatttgttggatggtactataactggagttctattgttggagcttttcaaaagagatggaatggggactatggtcgctagtgatgtatacgaaggaacacgagacgccaaagtaaatgatcttgcaggaatcagacgtatcatcaaacctttggaggaagctgggatcttggtccgcagaaccgacgaggagttactccaagctttggactccttcgtggtagtcgaaagggaaggtcaaatcatcgcttgtgcagctctgttcccattcttccaagacaaatgcggagaagtcgcagccatcgcggttgcatcagactgccgcggtcaaggccaaggcgataaactactagattacatggagaagaaagcatcctctctcgggttagacacgctgtttctcctcacaacgcgagcagcagactggttcgtgagacgcgggttccaagaatgctcaatcgaggtcataccagagaccagaaggcaaagaatcaacctctcaagaaaatcaaagtactacatgaagaagctactacctgataagagtggcatctcaatataacacaaacagcaatcattattgtaaaaattaaaaaacattttgcaatcaagcttttatttctattattcaagaaaaaaaaaaaaaaa

SEQ ID NO: 70124 - protein, 590 aa, Brassica napus
MMEQGALLRSASFQLRRTRNDLSSFKPENKLNPGQIRFRFKPVGSVAAKCNTYNSYAASGGGDAGAEHPVDDKEFVRWFREAWPYLWAHGGCTFVVVISGDILAGPYCDPILKDIAFLHHLGIRFVLVPGTQVQIDQLLSERGREATYVGRYRVTDAASLQAATEAAGAISVMLEAKLSPGPSICNIRRHGDSSRLHDIGVRVDTGNFFAAKRRGVVDGVDFGATGEVKKIDVDRICERLDGGSVVLLRNLGHSSSGEVLNCNTYEVATACALAIGADKLICIMDGPILDESGHLIRFLTLQEADTLVRKRVQQSDIAANYVKAVGDGSMAYQEPPGNGRAAFWGNGNHTPIFQNGVGFDIGSGLGSGEQGFAIGGEERLSRQNGYLSELAAAAFVCRGGVKRVHLLDGTITGVLLLELFKRDGMGTMVASDVYEGTRDAKVNDLAGIRRIIKPLEEAGILVRRTDEELLQALDSFVVVEREGQIIACAALFPFFQDKCGEVAAIAVASDCRGQGQGDKLLDYMEKKASSLGLDTLFLLTTRAADWFVRRGFQECSIEVIPETRRQRINLSRKSKYYMKKLLPDKSGISI

SEQ ID NO: 70125 - DNA, 1417 bp, Brassica napus
  CDS (151)..(1176)
gaattcccgggtcgacagtaactattggttcattactgtttgcctgcgacatacaccgctgaagattttaactaatttgtaactaaacctgagagactctctcgcttcagtattatctccgccgcctactccggtaggagtcactcagatatggccaccgtcacatccaaaacgccgcctaaatccttctccttctccatttccaatcctctcaaacccctaacccccaaatctccatccctccgctttccacctcgcaacaatcatcaccaccaccgtttatccgtaaacgccgccgtatcaccaccgccttcagacacaccttcgccggattatagattcgagatcctctccgagtccctacccttcatccaaaaattccgaggcaaaaccatcgtcgtcaaatacggcggcgcggccatgacttcgccggagctaaaagcctccgtcgtcaccgacctcgtcctcctcgcgtgcgtcggtctccgccccatcctcgtccacggcggaggtcccgacatcaaccgctacctcaaacagcttaacatcccggccgagttccgcgacggactccgcgtcaccgacgccacgacgatggagatcgtctcgatggttctcgtcggaaaagtgaacaagaatctcgtttctttaataaacgccgccggagccaccgctgttgggctgtccggacacgacggtcgtcttatcaccgcgcggcctgttcctaactcggatcagttaggttttgtcggagaagtcgcgagggttgatccgagcgtgttgcgtcccttagtagaatccggttacattccggtgattgcctctgtggctgcggatgaagctggtcaggcttataacatcaatgcggatacggtggcgggggagctcgcggcggcgcttggagctgagaagctgattctgttgactgatgtggcggggatcttggaggatagagaggatgtggggagcttggtgaaggagattgatataaagggagtgaagaggatgattgatgatgggaaagttggtggtgggatgattcctaaggtgaagtgctgtataaggtcacttgctcagggagtgaagacggcgagtattatcgatgggaggaggcagcattctttgcttcatgagatcatgtctgatgaaggagctggaactatgattactggatgaaatgtgatgttataggtgatccatggttttgtatttgagaatgccaatgcctgtgtgtaggcaagatacattcatgatcgctgcttatgagtcttagaaagacaatttttttggcagctcttgtggtttgcatttgcaacttcgttgtttctgatttctaatgattatcattggtcttgaaaagttataaatttttgaagacaataagctgttctaaggaaaaaataaaaaaaaaaaaaaa

SEQ ID NO: 70126 - protein, 341 aa, Brassica napus
MATVTSKTPPKSFSFSISNPLKPLTPKSPSLRFPPRNNHHHHRLSVNAAVSPPPSDTPSPDYRFEILSESLPFIQKFRGKTIVVKYGGAAMTSPELKASVVTDLVLLACVGLRPILVHGGGPDINRYLKQLNIPAEFRDGLRVTDATTMEIVSMVLVGKVNKNLVSLINAAGATAVGLSGHDGRLITARPVPNSDQLGFVGEVARVDPSVLRPLVESGYIPVIASVAADEAGQAYNINADTVAGELAAALGAEKLILLTDVAGILEDREDVGSLVKEIDIKGVKRMIDDGKVGGGMIPKVKCCIRSLAQGVKTASIIDGRRQHSLLHEIMSDEGAGTMITG

SEQ ID NO: 70127 - DNA, 2132 bp, Glycine max
  CDS (116)..(1924)
gaattcccgggtcgacttcgctgtcgacgatttcgtggcaaacaaatttctgggcgtggcggctaaagtttgtgagtggtctctgccaccaaccccgcactgtgtgggatcttcaatggcaccttccttatgtctatcccttccaaacacttccaccttctctgatttcaacaagctacactgtttctgtttccacccaaaaaaaccgaaccggcaatttatgtctggttgggtcccagaagctcggcccgtggcggcccatttgggttaccgaaagaagcttaatgcgttgagccaagatggagagagctaccacgggacgatggaggataagcaattcgtgcgttcgtttcgcgaggcctggccttacttgtgggcctatcgtggtagcacctttgttatcattatttccggtgaaattgtttctggtcctttcttggatcccattctcaaggatatagctttccttaatcacctaggtatccgctttgttcttgttccggggacacatgtgcagatagacaagcttctgaatgagagagggtgccagcctaagtatgttggtagatataggataactgatgatgaatctctggaagctgcgatggaagcagctggaggcataagattgatgatagaagcaaaactttctcctggaccttctatatgcaatattcgtcgacatggtgacaatagtcgatggcacgaagttggtgtcagtgttgccagtggtaactttcttgcagccaagagaagagaggtggtcaatggaattgattttgggtcaactggggaagttaaaaaagtagacgtatctcgcatgcgtgagagacttgatggtggttgtgtagttatattaaccaacttgggctactccagctctggagaagtattaaattgcaacacttatgaagttgccacagcttgtgccttggctataggggcagacaaattaatatgccttatagatggtccaatacttgatgagagtggacgcttaattcgtttcttgccacttcaagaagcagacatgctaattcgtaaacgggctgagcaaagtgaagcagctgctaactatgtgaaagctgttgacgaagaaggtttcaactctcttgagtataacaattttaatggagcagtcaaatcaccacctattggacgttttacagaatggcataatgcaaccttccataatggtgttggttttgagagtggaaatggcttagggtctggtgagcaaggttttgctattggaggtcaagaacggctaagtcgaatgaatggttacctgtcagaattggctgctgcagcttttgtttgcagaggtggtgttcaaagagttcacttgctggatggaactattagtggagttttgttgttggaattgtttaaaagagatgggatgggaacgatggtggctagtgacctttatgaaggcactcggacagcaggggtaaaagatatttctggaataaaacaacttattcagcctttggaggcatctggcatattggttaagcggactgatgaagagctgttaaaaacattggattcgttcattgttgtggaaagagaaggtcacataattgcttgtgctgccctttttcctcactttgaggagaagtgcggagaggttgcttgtattgcagtatctcctgattgccgtggccaaggacagggtgacaaattgcttgattatatggagaagaaagcatcatctcttggattgaatatgcttttccttcttacaacacgtacagcagattggtttgtaaggcgtggattttcggaatgttcaattgattatcttcctgaaaagaaaaggagaatgatcaatctttcccgcaattctaagtattatatgaagaagcttctgccaaatattagtggaattactgttggtgtaaaatctgcttcaagttagtactattttatgttgtttccacctaccaggaatggagggtgattggaagcaatattatgaggcacttctatagataattacttcgtaacagtatggcctctagaattattactatctctggcaggtcttccacgtgtaagcattaagtttctaactttctactgttaatatattgttagtatttaatttccgcaaaaaaaaaaaaaaa

SEQ ID NO: 70128 - protein, 602 aa, Glycine max
MAPSLCLSLPNTSTFSDFNKLHCFCFHPKKPNRQFMSGWVPEARPVAAHLGYRKKLNALSQDGESYHGTMEDKQFVRSFREAWPYLWAYRGSTFVIIISGEIVSGPFLDPILKDIAFLNHLGIRFVLVPGTHVQIDKLLNERGCQPKYVGRYRITDDESLEAAMEAAGGIRLMIEAKLSPGPSICNIRRHGDNSRWHEVGVSVASGNFLAAKRREVVNGIDFGSTGEVKKVDVSRMRERLDGGCVVILTNLGYSSSGEVLNCNTYEVATACALAIGADKLICLIDGPILDESGRLIRFLPLQEADMLIRKRAEQSEAAANYVKAVDEEGFNSLEYNNFNGAVKSPPIGRFTEWHNATFHNGVGFESGNGLGSGEQGFAIGGQERLSRMNGYLSELAAAAFVCRGGVQRVHLLDGTISGVLLLELFKRDGMGTMVASDLYEGTRTAGVKDISGIKQLIQPLEASGILVKRTDEELLKTLDSFIVVEREGHIIACAALFPHFEEKCGEVACIAVSPDCRGQGQGDKLLDYMEKKASSLGLNMLFLLTTRTADWFVRRGFSECSIDYLPEKKRRMINLSRNSKYYMKKLLPNISGITVGVKSASS

SEQ ID NO: 70129 - DNA, 1210 bp, Helianthus annuus
  CDS (57)..(953)
gtcgacgatttcgtttgcccgatagtaaatcggactcggtaaagtttgatgcaaggatgctctctttcctgccgaaaacgatatttgagaagcatgaggagtacctttacttgaggctggtgaaagacatcatttctaatggcgctttaaagggtgaccgtactgggactggtactttatcaaaatttggttgtcagatgcggttcaatctgagaaagtctttcccgcttcttacaacaaagaaagtgttttggcgtggagttgtggaagaacttttgtggttcatcagtgggtcaacaagtgccaaggttttacaagataagggcattcatatatgggatggtaacgcatccagaaactacctagacagtattgggttggtggatagagaagaaggtgacttgggaccagtatacgggtttcagtggagacactttggtgcaagctataccaacatgcatgctgactacactggccaaggattcgatcaactgctagacgttatcaacaaaataaaaaacaatcctgacgatcgtcgaataattatttcagcgtggaacccttctgatcttaagcagatggcgcttccaccttgtcacatgtttgcacagttttatgtaaatcaaggagagttatcgtgtcaaatgtatcaacgatctgccgatatgggtttgggcgttccttttaacatagcgtcatacgccttattaacatgcatgatcgcccatgtttgtgatcttgttccgggtgattttgttcacgttcttggtgatgcgcatgtctatagcaatcatgtccgacctctgcaggaccagcttcagaagctgcctagaccttttcctattttgaagatcaatcctgagaagaaggatatagatgcttttgtggcgaatgattttaaactcataggctatgatccccaccagaaaatagaaatgaaaatggcagtatagagttatcatctatcttcaggtattcgtaaggacaaatatgaaccgttgttccctgtttacatcataatttatatctttatcttatggttttgcatagctacattcctatttaaacttgtcggtttactagaggactagaggtgcgtattattccgagctttatggcacttttagtagggcaaaataactattcgtattgcgcttttagttcatgctttatttgacatttcataattcatgctaaaaaaaaaaaaaaa

SEQ ID NO: 70130 - protein, 298 aa, Helianthus annuus
MLSFLPKTIFEKHEEYLYLRLVKDIISNGALKGDRTGTGTLSKFGCQMRFNLRKSFPLLTTKKVFWRGVVEELLWFISGSTSAKVLQDKGIHIWDGNASRNYLDSIGLVDREEGDLGPVYGFQWRHFGASYTNMHADYTGQGFDQLLDVINKIKNNPDDRRIIISAWNPSDLKQMALPPCHMFAQFYVNQGELSCQMYQRSADMGLGVPFNIASYALLTCMIAHVCDLVPGDFVHVLGDAHVYSNHVRPLQDQLQKLPRPFPILKINPEKKDIDAFVANDFKLIGYDPHQKIEMKMAV

SEQ ID NO: 70131 - DNA, 1138 bp, Brassica napus
  CDS (7)..(1005)
taagaaatggaagcaaagaagaggcatgaatatgctgcggatttatcttccataaagaaagctcatgaacgtatcaagccgtacatacacaaaactccagtgctaacatctgaatccttgaattcaatctctggaagaagcttgttctttaagtgcgagtgctttcagaaaggtggagctttcaagtttcgtggagcatgcaatgctgtcttgtctcttgatgctgaacaagcagccaaaggggttgtaacacacagcagtggaaaccatgctgctgcgttgtctttggctgcgaagatgcaggggatccctgcgtatatcgttgtaccaaaaggtgctccgaagtgcaaagtagataatgtgatccggtatggtggtaaggttatatggagtgaagcaacaatgtcttctcgagaggaagtagcttccagagttttgcacgaaacaggttctgttctcatccacccatataatgatggacgcatcataagtggtcagggtactgttgcgttggaactgttggagcaaatccaagagattgacactataattgtgccgataagcggggggggtttgatctctggtgtggcgctggctgctaagtcaattaagccgagcatccggattatagcagctgaaccaaaaggagctgatgatgcggctcagtctaaggttgctggtagaatcatcactttacctgtggctaataccatagcggatggccttcgtgcttctctaggagacttaacatggcctgtagtgagagatatggtagatggtgttgtagttgtggaggatggggaaataattgaagccatgagaatgtgctatgagatgctgaaagtctctgtggaaccaagtggtgccattggcctagcagcagttttatcaactagtttccgtagcaatccttgttggaaagattgtaaaaacatagggattgtactcccaggaggtaatgtcgatttgggtgttctgtgggattcacttaagagttcagagtaattaaacatcttggttactgcatttgtttcactattgatgtcgatgtgagaattgtctgtagaattttgaacaaaaggattcatgttcttgcaagaaactccaaattagtacagagtccaaaaaaaaaaaaaaa

SEQ ID NO: 70132 - protein, 332 aa, Brassica napus
MEAKKRHEYAADLSSIKKAHERIKPYIHKTPVLTSESLNSISGRSLFFKCECFQKGGAFKFRGACNAVLSLDAEQAAKGVVTHSSGNHAAALSLAAKMQGIPAYIVVPKGAPKCKVDNVIRYGGKVIWSEATMSSREEVASRVLHETGSVLIHPYNDGRIISGQGTVALELLEQIQEIDTIIVPISGGGLISGVALAAKSIKPSIRIIAAEPKGADDAAQSKVAGRIITLPVANTIADGLRASLGDLTWPVVRDMVDGVVVVEDGEIIEAMRMCYEMLKVSVEPSGAIGLAAVLSTSFRSNPCWKDCKNIGIVLPGGNVDLGVLWDSLKSSE

SEQ ID NO: 70133 - DNA, 1111 bp, Brassica napus
  CDS (29)..(928)
gtcttgctccgccgtcaggggaaagaatatggaagcagccactgctgttcagaggtttcactactcaccatcatcatggattgattggagaaattttgaagggaagcctcgtggttctctacgttactctcagcgaatcaaagagaataaaaggcttagagttattgctttatctcacttgcaacctgacaaaagaagagatcttcgacaactatcagtttcggacaagaactcctcagcattgttggaaactggagatcttcttcattctccatttgatgaagaactggttttgaagagaaaagctgaagaggtcaaaccgtatttgaatggacgatctatgtatcttgttggaatgatgggttccgggaagacgacagtaggaaagatcatggcaaaagcacttggctatacactctttgattgtgacacaatgatcgaggaggcgatgaatagaacttctgtagctgagatatttgagcatttcggtgagagtgtcttcagagagaaagagacagagacactaaagaagctctctttgatgtaccaccaagttgttgtgtcaacaggtggaggtgcggttataagacccattaactggaagtatatgcataaaggtattagcatttggcttgatgttcccctagaagccttagcgcaaaggattgctgctgtaggaacaaactcaagaccattgttacatgatgatgagtcaggaggagacccatacacagtggctttcaaccgtctttcaacgatttgggaaacacgtggtgaagcatacactaacgcaagcgcgagagtctccttggagaatattacatcaaagcacgggtatagaaacgtctcagaccttacaccaactgaaatcgccgttgaggcctttgagcaagttcagtgctttctcaacaaaggagacaagtattgatagacccggtggcctatagttcaagcgcttgagcttgtttgtgcctagttttgactgttactacggtatatataattgaataatactgtttgtttgattactttgtcatattatctatccactggaccccaaaaaaagggaaataagtcatttgatttttttttatttaaaaaaaaaaaaaaa

SEQ ID NO: 70134 - protein, 299 aa, Brassica napus
MEAATAVQRFHYSPSSWIDWRNFEGKPRGSLRYSQRIKENKRLRVIALSHLQPDKRRDLRQLSVSDKNSSALLETGDLLHSPFDEELVLKRKAEEVKPYLNGRSMYLVGMMGSGKTTVGKIMAKALGYTLFDCDTMIEEAMNRTSVAEIFEHFGESVFREKETETLKKLSLMYHQVVVSTGGGAVIRPINWKYMHKGISIWLDVPLEALAQRIAAVGTNSRPLLHDDESGGDPYTVAFNRLSTIWETRGEAYTNASARVSLENITSKHGYRNVSDLTPTEIAVEAFEQVQCFLNKGDKY

SEQ ID NO: 70135 - DNA, 1975 bp, Triticum aestivum
  CDS (88)..(1887)
gcgttcccacggccaccagccactacgcctgctccgcggttccatcagcgcctagctccaaaaggtcgtcattgagaggctgcaccaatgggttccattcctacttattgttcttatcaaacaaacagtgttggttcactgaaactgtcacctcacatccaattccagcaatcttgtaacaatggagttatgtttgtatccatgcggaataagacacagctggccaaaagaagagccacaaattatggaactcatcctaattctagtaggactcctgcacctatcgtatgttcaactggaatgcccataattttcgttgccactgaagtgcacccatggtgcaaaactggaggccttggtgatgtcgtaggaggattgcccccagctctggctgcaatggggcaccgggttatgacgatagctcctcgctatgatcagtacaaggatacatgggatacaaatgttcttgttgaggtaattgttggtgacagaacagaaacagtgcgcttttttcactgctacaaaaggggagttgatcgtgtttttgttgatcatcctatgtttcttgagaaggtatggggcaaaactggatcaaaattgtacgggcctaccactggaacagacttccgagataaccagttacggttctgccttttgtgccttgctgcattggaggctccgagggttcttaatctcaataattctgaatacttctctggaccatatggagaaaatgttgtcttcgttgcaaatgactggcacactgcagttttgccatgctatttgaagagcatgtataagcaaaatggaatttatgagaatgccaaggttgctttctgcattcacaatatcgcctatcagggcagatttcccagagcggacttcgaacttcttaatttacctgaaagtttcatgccgtcatttgattttgttgatgggcatgttaagccagtagtagggagaaagattaactggatgaaggcagggatcactgagtgtgacgtggtccttacagttagtccacattatgtcaaagaactcacttctggcccagagaaaggtgttgagttggatggcgtccttcgtgcaaagcctcttgaaactggaattgtaaatggaatggatgttgttgattggaatccagcaacagataagtacatcagtgtcaaatacaatgcaacaacggtggcagaagcaagagctctcaataaagaaatactgcaagctgaagttggattgcctgtggactctagcatacctgttatagttttcattggacgtcttgaagaacagaaagggtcagacatactaattgcagccataccggagtttctcgaggagaatgttcagataattgttctcggcacagggaagaagaaaatggaggaggaactgatgctgctagaagcgaagtacccacagaatgccagaggcatagcaaaattcaatgtcccattggcgcacatgatgttcgccggggctgatttcatcattgttccaagtaggtttgagccatgtggcctcatccaattgcaagggatgagatatggagtgattcccatctgttcatccaccggaggacttgttgacacggtgagggagggtgtcaccggattccacatgggttcgttcaatgtcgagtttgaaaccgtcgatccagcagatgtcgcggcagtcgcttcgaatgtcacacgagctctgaaacagtacaaaacaccgtcgttccacgcaatggttcggaattgcatggcgcaggacctatcttggaagggaccggcaaagaagtgggaggaggcacttcttggcctaggagtcgagggaagtcagctgggcatcgagggcgaggagatcgctccacttgcgaaacagaatgtggccactccctgaaatctccaaatattagggagagtgttctaagattcgacaaaataatgaggttgctaaagatgaagctgtattcaaaaaaaaaaaaaaa

SEQ ID NO: 70136 - protein, 599 aa, Triticum aestivum
MGSIPTYCSYQTNSVGSLKLSPHIQFQQSCNNGVMFVSMRNKTQLAKRRATNYGTHPNSSRTPAPIVCSTGMPIIFVATEVHPWCKTGGLGDVVGGLPPALAAMGHRVMTIAPRYDQYKDTWDTNVLVEVIVGDRTETVRFFHCYKRGVDRVFVDHPMFLEKVWGKTGSKLYGPTTGTDFRDNQLRFCLLCLAALEAPRVLNLNNSEYFSGPYGENVVFVANDWHTAVLPCYLKSMYKQNGIYENAKVAFCIHNIAYQGRFPRADFELLNLPESFMPSFDFVDGHVKPVVGRKINWMKAGITECDVVLTVSPHYVKELTSGPEKGVELDGVLRAKPLETGIVNGMDVVDWNPATDKYISVKYNATTVAEARALNKEILQAEVGLPVDSSIPVIVFIGRLEEQKGSDILIAAIPEFLEENVQIIVLGTGKKKMEEELMLLEAKYPQNARGIAKFNVPLAHMMFAGADFIIVPSRFEPCGLIQLQGMRYGVIPICSSTGGLVDTVREGVTGFHMGSFNVEFETVDPADVAAVASNVTRALKQYKTPSFHAMVRNCMAQDLSWKGPAKKWEEALLGLGVEGSQLGIEGEEIAPLAKQNVATP

SEQ ID NO: 70137 - DNA, 1492 bp, Triticum aestivum
  CDS (43)..(1197)
agaatctgcacaggcagcaaaccagtaggcaactctccagcaatggctgccgctgcatcgtcgccctcccctccggcggtcatcacctgccgagcggcggtggcatgggggccggggcaggcgctggtgatggaggacgtggaggtcgccccgccggggccactggagatccgcgtcaaggtcgtctccacctccatctgccgcagcgacgtcacccagtggcagtccacggcgcagcccgatctgttccccagaattttcgggcacgaagcatccggggtggtcgagagcgtcggggaaggagtgaccgagttccaagtgggagaccacgcgctcaccgtcttcatcggggaatgcatgagctgcaagcactgcgtgtcggggaaaagcaacatgtgccagacgctcggtctggagaggaagggcgtcatgcacagcgaccagaccacccgcttctccatcggcgggaagcccgtgtaccattactgcgccgtgtcgagcttcagcgagtacgcggttgtccactcgggctgcgcggtcaaggtcagccccaccatgcccatggacaggatatgcctgctcagctgcggcgcgtccgcaggccttggtgcggcttggaatgttgctgatgtatccaaggggtcaagtgtagttatatttggtctgggaactgtaggactttcggtagctcaaggtgctaagctacggggagcttccaagattattggagtagataccaatcctgctaagcaagaaaaggggaaggcttttggtgttacagattttattaatcctgccgaattgaatgaacctgttcagcaggtagtaaaacggcttactgatggaggggctgattactcttttgaatgtgtgggtgataccggagtagtctcgactgcattgcaatcatgttctgatggatggggactgactgtaactcttggtgtaccaaaagcaaaaccagaagtttctgctcattatggattgcttctctctggaagaacactgaaggggtctttgtttggaggatggagacccaaaactgatatacctttgttagtggagaagtacgcaaacaaggaaatccaagttgatggccttgtcacacatgatatgccattcagtgacatcaacaaagcgcttgaactgatgctacaaaacaggtgtttgcgatgcgtgattcacatgccaaagtgacaggattgatttatacatcagtgccatcatacctgtacaattttggtggttttctcatcagtaatttttcacttgatctgctcctggctcgagttttcatgacaccaacatattgaagctccagtgtgattctctattggtgtctcaccttagagttatggtgttatagttgttgaggagattacaaatcatactgatattcccttggaattcctcatatgtccgacctcaagaattattcgtgtaatctaacttgttaaaaattgatctgttagtgattaaaaaaaaaaaaaaa

SEQ ID NO: 70138 - protein, 384 aa, Triticum aestivum
MAAAASSPSPPAVITCRAAVAWGPGQALVMEDVEVAPPGPLEIRVKVVSTSICRSDVTQWQSTAQPDLFPRIFGHEASGVVESVGEGVTEFQVGDHALTVFIGECMSCKHCVSGKSNMCQTLGLERKGVMHSDQTTRFSIGGKPVYHYCAVSSFSEYAVVHSGCAVKVSPTMPMDRICLLSCGASAGLGAAWNVADVSKGSSVVIFGLGTVGLSVAQGAKLRGASKIIGVDTNPAKQEKGKAFGVTDFINPAELNEPVQQVVKRLTDGGADYSFECVGDTGVVSTALQSCSDGWGLTVTLGVPKAKPEVSAHYGLLLSGRTLKGSLFGGWRPKTDIPLLVEKYANKEIQVDGLVTHDMPFSDINKALELMLQNRCLRCVIHMPK

SEQ ID NO: 70139 - DNA, 1254 bp, Zea mays
  CDS (1)..(1254)
atggccatgtccgcttcctcctcctcgcgcgccctcctccgccggatcggcggcgcgctcctccgccgctccttctcctcctcatccgccgccgccgccgcagggtaccacgtcgcgggcgggcccagctacatgcgcggcgccgtcttctgggagcccggccgcccgctcacgctcgaggagttccgcatgccgcggcccaaggccggcgagctcctcatcaagaccaaagcctgcggggtctgtcactccgatctccatgtcctcaaaggcgagctccctttctccacgccctgtgtcgtgggccatgagatcactggagaggtggttgaccatggcacgcacactcctgttgagatcatcaacaggttcccagtcggaagtcacgtcgtcggcgccttcataatgccatgtgggaactgcttctactgcgttaagggccaagaagatctgtgtgagtctttcttcgcgtataatcgtgccaaggggacactctatgatggcgagacacggctgtttctaaggggcaatgggaaaccggtgtacatgtatagtatgggagggcttgcagagtattgtgttgtcccagccaatgcgctagcagttctccctgactcactgccatacacagaatcagcaattttaggatgtgcagtgtttaccgcgtatggtgccctgaggcatgctgctgaaatgcggcctggtgattcagtagctgtgatcggagttggaggggttgggtcaagctgtttacagatagcaaaagcctttggagcttcccaagtcattgcagtggatgtccttgatgagaagcttcagaacgctacaacacttggagcaacccacactgtaaatgcagcaaaagatgatgcagttgaaaggataaaggaaattactgatggtaggggtgtagatgtggctatagaggcacttggtaaggcgttaacattttcccagtgcgccaagagcgtgcgtgatggaggcaaagctgttatgatcgggcttgctgcaacgaacgtaatgggagaggttgatataacccgtcttgtccgacgacaggtgaaaatcattggctcatatggcgcaagggctaggcaagaccttcctcagatagtgaagctcgcggagagtggtgccttcaatctccaaaacaccatatcaaggaaatgcaaatttgaggaggcgaatggcgcctatgaggatctcaatcagggcaagatcgtaggacgagctgtggttgagatcatggagtga

SEQ ID NO: 70140 - protein, 417 aa, Zea mays
MAMSASSSSRALLRRIGGALLRRSFSSSSAAAAAGYHVAGGPSYMRGAVFWEPGRPLTLEEFRMPRPKAGELLIKTKACGVCHSDLHVLKGELPFSTPCVVGHEITGEVVDHGTHTPVEIINRFPVGSHVVGAFIMPCGNCFYCVKGQEDLCESFFAYNRAKGTLYDGETRLFLRGNGKPVYMYSMGGLAEYCVVPANALAVLPDSLPYTESAILGCAVFTAYGALRHAAEMRPGDSVAVIGVGGVGSSCLQIAKAFGASQVIAVDVLDEKLQNATTLGATHTVNAAKDDAVERIKEITDGRGVDVAIEALGKALTFSQCAKSVRDGGKAVMIGLAATNVMGEVDITRLVRRQVKIIGSYGARARQDLPQIVKLAESGAFNLQNTISRKCKFEEANGAYEDLNQGKIVGRAVVEIME

SEQ ID NO: 70141 - DNA, 1511 bp, Brassica napus
  CDS (147)..(1382)
gcggccgctgcgtgtgggtctctctctctccaaaagagaagagcctcgtccgtcactcattgtgggtctcgtcttacagacacccaaagagggaagaagaagaagaagcaaatcattacacatttttttttgtgtttcacaaagagatggagagagcaaccatttccccgagcctgagtcaaaactacttactttgtccttcaccacgcgcctttaccacgcgcctccactccttctccactactcggaacctatctccgtcatcttgctcctcctccatcaagcttcagcattcttcttccaatggcggaacctcccttactcgttgcaacgccgtcctctccaattcgtcttccagtgcggaggtagcagacatagattgggacaacatagggttcggtcttaagccgactgattacatgtacgtcatgaaatgcaacctcgatggggagttctcaaagggtgaattgcaactttttgggaacattgaagtcagcccatctgctggtgttctcaactatggacagggactgttcgaaggaatgaaagcttacagaaagcaagacggtaagaacatcctcctctttcgtcctgaagagaatgcaaatcgtatgagaagtggcgccgagaggatgtgtatgcctgctcctaccattgaccagtttgtcaaagctgtcaaagcaaccgtattagcaaacaaacgttgggttccacctgcagggaaaggttctttgtatattagaccgttgctaatgggaactggagctgttcttggtcttgcccctgctccagaatatactttccttgtctatgtttctcctgttggaaactacttcaaggaaggtgtggcaccaatcaatttgattgtggaaagtgaatttcaccgtgcaacacctggtggtaccggtggtgttaagaccatcggcaactacgctgcagtactgaaagcacagtcgattgcgaaatctaaaggatattccgacgttttgtaccttgattgcgttcacaaacgataccttgaagaggtctcctcttgcaatatcttcattgtcaaggacaatgtgatctctactcctgatataaaaggaacaatcttaccagggattacgcggaaaagtataatcgacgtggctcgtacccaaggttttaaggtggaggaacggaatgtgacagttgacgagttactagaagctgacgaggttttctgcacaggaaccgccgtggttgtctctccagttggaagcattacgcacaaaggcaaaagagtatcttatggagaaggtagctttggacccgtctcggagaaactctacaccgttctgacaagcttgcagatgggtctgagcgaggacaacatgaactggactctgaatctgagttagaaaaactctacaccagtgttttcggttttatttttcatcctcgtatgagtctctcattcttattcgtaaaactacaagttggattgttttaaaaacttggttcgatctcaaaagtcgacccgggaattc

SEQ ID NO: 70142 - protein, 411 aa, Brassica napus
MERATISPSLSQNYLLCPSPRAFTTRLHSFSTTRNLSPSSCSSSIKLQHSSSNGGTSLTRCNAVLSNSSSSAEVADIDWDNIGFGLKPTDYMYVMKCNLDGEFSKGELQLFGNIEVSPSAGVLNYGQGLFEGMKAYRKQDGKNILLFRPEENANRMRSGAERMCMPAPTIDQFVKAVKATVLANKRWVPPAGKGSLYIRPLLMGTGAVLGLAPAPEYTFLVYVSPVGNYFKEGVAPINLIVESEFHRATPGGTGGVKTIGNYAAVLKAQSIAKSKGYSDVLYLDCVHKRYLEEVSSCNIFIVKDNVISTPDIKGTILPGITRKSIIDVARTQGFKVEERNVTVDELLEADEVFCTGTAVVVSPVGSITHKGKRVSYGEGSFGPVSEKLYTVLTSLQMGLSEDNMNWTLNLS

SEQ ID NO: 70143 - DNA, 1332 bp, Brassica napus
  CDS (87)..(1250)
tataacctctgaaaatagaatcgtacaataacatttcatcttaagtgtttcagtttggtgcacaacaagctcatacaacatttgtcatggctcttcgctgcttatctcaatcttcatcaacaactttctcttatctctctaagatctgtggatttcgtatgcatgggactaaggcagcagtttctgttgtagaagaacatgtctcgaagatggtggggacaggacgtgaggatgaagagtatgctgatgtggattgggacaacctcggattcagtcttgtacggacagattacatgttcgccaccagaagttgcagagaaggaaacttcgaacaaggttgccttagccgttacggcaacatcgagctcaaccctgctgctggaattctcaactacggccagggattaatcgaggggatgaaagcttacagaggagaagatggtagggttcttctatttcgtccagagttaaatgccgtgcgtatgaagaaaggagcagagagaatgtgtatgcattctccttctgttcaacagtttattgaaggtgttaagcaaaccgttcttgcaaacagacgctgggttcctcctcctggaaaaggctccttgtatctcagaccattgttgtttggaagtggagcaagcttgggtttgtctgcagcatcagagtttacgtttcttgtgtttggttctcctgttcaaaactattttaaagaaggtacatcagcactgaatctctacgttgaggaggtgattccacgcgcgtatcttggaggaagtggtggcgttaagtccatttctaattacggtccagtgcttgaagtcatgagaagagcgaaagcgagagggttttcggatgttttgtatctggatgcagaaactaagaagaatatggaggaagtttctgcttctaatatattccttgtgaaggggaatacaatagtgactccagctacaaacgggacgattctcggagggatcacacgaaagagcgtaatcgaaattgctattgatcttggttacaaggtggaagaacgagtagttccggtagaagaactgaaggaagcagaagaagttttctgcactggaactgccaccggagttgcttctgttgggagcatcacgtttcagaacaccaggactgagtacaaagttggagatgggcttgtaacgcagcaacttcgatctattcttgtcggaatacaaactggttctatccaagacactaagaattgggtgttggagatagattaatttcagagaaaaataaatcaattgttatgttgcactctttgatgtatcaaaagatttggaactctcgaaaaaaaaaaaaaaa

SEQ ID NO: 70144 - protein, 387 aa, Brassica napus
MALRCLSQSSSTTFSYLSKICGFRMHGTKAAVSVVEEHVSKMVGTGREDEEYADVDWDNLGFSLVRTDYMFATRSCREGNFEQGCLSRYGNIELNPAAGILNYGQGLIEGMKAYRGEDGRVLLFRPELNAVRMKKGAERMCMHSPSVQQFIEGVKQTVLANRRWVPPPGKGSLYLRPLLFGSGASLGLSAASEFTFLVFGSPVQNYFKEGTSALNLYVEEVIPRAYLGGSGGVKSISNYGPVLEVMRRAKARGFSDVLYLDAETKKNMEEVSASNIFLVKGNTIVTPATNGTILGGITRKSVIEIAIDLGYKVEERVVPVEELKEAEEVFCTGTATGVASVGSITFQNTRTEYKVGDGLVTQQLRSILVGIQTGSIQDTKNWVLEID

SEQ ID NO: 70145 - DNA, 1827 bp, Glycine max
  CDS (321)..(1559)
gaattcccgggtcgacatgagctttttagacatgacaagggcatcttgcaaactttttctgcatgattctctgttcttgctattgattgtaatctgagtcatgttgcttgttaggagctttgagtagtagccaatggatatggcagtttcttgtttgtctccagtcagaacccatactttaatgcctgcaatccttagagactcaatggattcaggcacaccttgttgcagcttatcttaaatggaagatgcacctaatatggcaaaactgttctctacggctgttcttgtgggtgttgttggattggaatcggagagaaatggagagcagcgccgtctacggaagcattcgaccaagttacccgatctgcccctctcgacgttcttcctctcttctctctcaccaatctcccttcctattcgagccttctctttctctcaagcttcgcaagcagtttcctctcatttcgcagaattttctggaagccgcttctcctctcaggccttctgccactttgtcttctgattcctaccgtgagacgattgaattagctgatatagaatgggacaaccttggttttgggcttcaacccacggattatatgtattccatgaaatgcacacgaggtggaaccttctccaaaggtgaactgcagcgttttggtaacattgaattgaacccctcagcaggagttttaaactatggtcagggattatttgagggtttgaaagcgtatcggaaacaagatgggagtatactcctcttccgtccggaagaaaatggtttgcggatgcagataggtgcagagaggatgtgcatgccatcgcctactgttgagcagtttgtggaagctgtaaaggagacagttttagcaaacaaacgttgggttccccctgcaggtaaaggttccctgtatattagacctttgctaatgggaagtggaccggtacttggtcttgcacctgctccagagtacacctttctaatatacgtttcacctgttgggaactacttcaaggaaggtttggccccaatcaatttgattgtggaaaatgaattacatcgtgcaactcctggtggcactggaggtgtgaagaccattggaaactatgctgcagttctgaaggcacagtctgaagcaaaagctaaaggctactctgatgttttataccttgactgtgtgcacaaaagatatttggaggaggtttcttcatgcaacatttttgttgttaagggtaacgttatttcaactccagctattaaagggacaatcctacctggcattactcgcaaaagtataattgatgttgctcgaagccaagggttccaggttgaggagcgattagtgtcagtggatgaattgctagatgctgacgaggtcttctgcacgggaacagctgtggttgtatcacctgttggcagtattacttatcttgacaagagggtagcatatggggatggtattggcgtggttgcacagcaactttatactgtctttaccagattacagatgggtcttacggaggatgagatgaattggactgttgagctgagataagcgcaccatgaatagtttgcagttcatgttttgctggaacacatgttcttttaaaatttccgagctctagaagttgcttttaaaattttgctatcatatgattagatgctgtagatagtattatggtgtgtttattgctattgaatgactatagcaagtacatacggttgcctcttgctatctggagaaatcgttgctagtggattagtaaaccttttcattggttgaaaaatagaattctggtagatgcggtaaaaaaaaaaaaaaa

SEQ ID NO: 70146 - protein, 412 aa, Glycine max
MESSAVYGSIRPSYPICPSRRSSSLLSHQSPFLFEPSLSLKLRKQFPLISQNFLEAASPLRPSATLSSDSYRETIELADIEWDNLGFGLQPTDYMYSMKCTRGGTFSKGELQRFGNIELNPSAGVLNYGQGLFEGLKAYRKQDGSILLFRPEENGLRMQIGAERMCMPSPTVEQFVEAVKETVLANKRWVPPAGKGSLYIRPLLMGSGPVLGLAPAPEYTFLIYVSPVGNYFKEGLAPINLIVENELHRATPGGTGGVKTIGNYAAVLKAQSEAKAKGYSDVLYLDCVHKRYLEEVSSCNIFVVKGNVISTPAIKGTILPGITRKSIIDVARSQGFQVEERLVSVDELLDADEVFCTGTAVVVSPVGSITYLDKRVAYGDGIGVVAQQLYTVFTRLQMGLTEDEMNWTVELR

SEQ ID NO: 70147 - DNA, 1860 bp, Glycine max; identical to SEQ ID NO: 70097
  CDS (135)..(1622)

SEQ ID NO: 70148 - protein, 495 aa, Glycine max; identical to SEQ ID NO: 70098

SEQ ID NO: 70149 - DNA, 1726 bp, Brassica napus; identical to SEQ ID NO: 70093
  CDS (76)..(1554)

SEQ ID NO: 70150 - protein, 492 aa, Brassica napus; identical to SEQ ID NO: 70094

SEQ ID NO: 70151 - DNA, 2002 bp, Triticum aestivum
  CDS (128)..(1711)
cgaacattcctctttctctcccttgcttggggaagaagaagaagaagaagaagaagagagggcgagcgcccccgcctcccgacgccgtcgcccctcgccgccgatctgatctcaggagccagcgaagatgcattccaccaatctgctcctcgaggagcccatccggatggtctccatcctcgagccatccaagccgaacttcttcccggcgatgacgaagattgtggggacgctgggtccgaagtcccggtccgttgaggccatctccgcctgtctaaaggccggcatgtctgtggcccgtttcgatttctcgtggggggatgccgcgtaccaccaggagacactcgagaacctcaagctcgccatcaaggccaccaagaagctatgtgctgttatgctcgacactgttggccctgagttgcaagtggtgaacaagagtgaagtcacaatctcgcttgaagagaacgagtctgttgttctcacccctcaccagggccaggaggcctcttccaagttgctccctatcaacttcgctggactcgccaaggctgtgaagcccggagccacaatattcgttgggcaatatttgttcacgggcagtgagactacatcagtttggctggaggtttctgaagttcaaggggatgacgtggtttgcgtgatcaagaactcagctaccctggctgggtcactcttcacattgcactgctcccagatccatatcgacatgcccacgctgtctgatgaggataaagatgttatgaaaaaatggggtgctccaaacaagattgacttcctctctctttcttatacaaggcatgcagaagatgtgcggcaagcacgggagttcctctctaagttaggtgatcttagccaaactctgatttttgccaaaattgagaatgtggagggcttgaaccattttgatgagatcctggaggaagcggatggtatcattctgtcaagagggaaccttggaattgatcttccacctgaaaaggtgttcttatttcagaagtctgctctgcacaagtgcaacatggctggaaagcctgctgttgttactcgtgttgtggacagtatgacggacaacctaaggcctactcgtgcggaggcaactgatgtggcaaatgcggtgctggacggtagtgatgccattctccttggtgctgagactctccgtgggttgtatccagtcgagactatttcaacagtgggcagaatttgtgctgaggctgagaaggtcttcaaccaagatttgtatttcaagcgaaccgtgaaatatgtgggagaacccatgacccacttggagtctattgcttcctctgcagtgcgggctgctattaaagttaaggcttcggtcatcatttgcttcacttcatctggacgggctgcaaggctaattgccaagtacaggcccaccatgcctgtcctgtccgttgtcattcctcgtctgaaaacaaatcaattgaagtggagcttcacaggtgcatttgaggcaagacaatcactcatagttagaggcctctttcccatgcttgctgatccacgtcatccggctgattctactagcactacaaatgaatcagtgttgaaggttgctcttgaccacggcaaagcatctggtgtgatcaagtcgcatgaccgtgtcgtcgtgtgccagaaagtgggagattcctctgtcgtgaagatcattgagctagacgactaggcaaaattagcctttgctcagggcttgccagatttttgactaggccaaaacgttgcttggtggctatgtataattctatctatagttttgcaaaacgagcagtttttcctatggtgtcatcataggatccgcggttatcattctgaaacctacgctagttattatggatatgtcctcagattttactgcagtgtagcgagtaaatgatctgatggaataatgatatcaaaactttgtgacccttattgttgtcgctaagcctatgttcccatttgcaaaaaaaaaaaaaaa

SEQ ID NO: 70152 - protein, 527 aa, Triticum aestivum
MHSTNLLLEEPIRMVSILEPSKPNFFPAMTKIVGTLGPKSRSVEAISACLKAGMSVARFDFSWGDAAYHQETLENLKLAIKATKKLCAVMLDTVGPELQVVNKSEVTISLEENESVVLTPHQGQEASSKLLPINFAGLAKAVKPGATIFVGQYLFTGSETTSVWLEVSEVQGDDVVCVIKNSATLAGSLFTLHCSQIHIDMPTLSDEDKDVMKKWGAPNKIDFLSLSYTRHAEDVRQAREFLSKLGDLSQTLIFAKIENVEGLNHFDEILEEADGIILSRGNLGIDLPPEKVFLFQKSALHKCNMAGKPAVVTRVVDSMTDNLRPTRAEATDVANAVLDGSDAILLGAETLRGLYPVETISTVGRICAEAEKVFNQDLYFKRTVKYVGEPMTHLESIASSAVRAAIKVKASVIICFTSSGRAARLIAKYRPTMPVLSVVIPRLKTNQLKWSFTGAFEARQSLIVRGLFPMLADPRHPADSTSTTNESVLKVALDHGKASGVIKSHDRVVVCQKVGDSSVVKIIELDD

SEQ ID NO: 70153 - DNA, 1883 bp, Brassica napus
  CDS (119)..(1651)
caacccgaaaaaacaagaggttgttcttgttccgacacgacaacacatccagtatcggagctaataagagggaagaaagaagaaatagttgactgtgtttaagggtttctgttgaaaaatgtcgaacatagacattgaagggatattgaaggagctacctaacgatgggaggatcccaaaaaccaagatcgtttgcactctaggaccagcttctcgcactgttcctatgatcgaaaagcttctcagagccggtatgaacgtcgctcgcttcaacttctcacatggcagccatgagtatcaccaaggcacactcgacaacctccgcaccgctatgcagaacacaggcattctcgccgccgtcatgcttgacacaaagggacctgagattcgtactggtttcttgaaagatgggaaccctatacaactcaaggaaggccaagagatcactatcaccactgactacgaaactttaggagatgagacgacgatctccatgagctataagaagcttcccttagatgtgaagcccggaaacaccatactctgtgcagatggaagcataagtctagctgtcttgtcatgtgatccagagtctggaactgttaggtgcaggtgcgaaaacacggcgatgcttggcgagagaaagaacgtgaatctccccggtgtcgttgttgatctccccactctgacagacaaggatattgaagatattatgggttggggtgttcctaacagcatcgatatgattgcgctttcttttgtccgtaaaggctcagatcttgttaatgtcaggagggttcttggttctcatgctaaaagcattatgctgatgtcaaaggttgagaaccaggaaggagtggtgaactttgatgagatactgcgcgaaacagatgcattcatggtcgctcgtggtgatctcgggatggagattcccatagagaagatcttcttagctcagaagctgatgatctacaagtgcaaccttgcaggcaaaccagtggtgacagccactcagatgcttgagtcaatgatcaagtcaccaaggccaacacgtgctgaagccacggacgttgccaacgccgtccttgacggcacagactgcgtgatgctcagcggagagagcgcagcaggagcttatccggagatagccgtgaaagtcatggccaagatctgcattgaagcggagagctctcttgactacaacacgatctttaaagagaggatcagagcaactccggttccaatgagcccgttagagagtcttgcatcgtcagctgtgagggctgcgaacaaagcgcatgcgaagctcatcattgtgttgactcgtggaggctcaacagctaagcttgtagctaagtacagaccctctgttccgattctttcggtggttgtaccagttatgaccacggattcctttgactggacttgtagtgacgagtcgcctgcaaggcatagtttgatatacagaggtttgatccctatgttggctgaaggatctgcaaaggcgacagatagtgagtccacagaggttatcattgaatccgctttgaagtcagctgtgcagagaggactgtgcaaccatggtgatgctgttgtggcgctgcaccgtattggagtcgcctcggttattaagatctgtgtggttaagtaaagaaataaagaatagctcttggctccttatgattgttggcaatcgtaactgagttgacttcgttacttgaaataaagatgtactgttggagacatctctctctctctctctctctctctctctctctgtcttttcagttttcaagattatgaatcttaaatctgctttgtatgaatcactatgtataacactgtttctcttcataagctttgcttacaaaaaaaaaaaaaaa

SEQ ID NO: 70154 - protein, 510 aa, Brassica napus
MSNIDIEGILKELPNDGRIPKTKIVCTLGPASRTVPMIEKLLRAGMNVARFNFSHGSHEYHQGTLDNLRTAMQNTGILAAVMLDTKGPEIRTGFLKDGNPIQLKEGQEITITTDYETLGDETTISMSYKKLPLDVKPGNTILCADGSISLAVLSCDPESGTVRCRCENTAMLGERKNVNLPGVVVDLPTLTDKDIEDIMGWGVPNSIDMIALSFVRKGSDLVNVRRVLGSHAKSIMLMSKVENQEGVVNFDEILRETDAFMVARGDLGMEIPIEKIFLAQKLMIYKCNLAGKPVVTATQMLESMIKSPRPTRAEATDVANAVLDGTDCVMLSGESAAGAYPEIAVKVMAKICIEAESSLDYNTIFKERIRATPVPMSPLESLASSAVRAANKAHAKLIIVLTRGGSTAKLVAKYRPSVPILSVVVPVMTTDSFDWTCSDESPARHSLIYRGLIPMLAEGSAKATDSESTEVIIESALKSAVQRGLCNHGDAVVALHRIGVASVIKICVVK

SEQ ID NO: 70155 - DNA, 1983 bp, Brassica napus
  CDS (100)..(1815)
atccccctctctctctctctcttaaatatcagttttaacagaaaacctcattctcattctctctcctctgcttgacctctgttcttcaagttgtacgacatggcggcgacaggtcaaatctcgacgagaatgacggtggatcgcactctgtcctcctccaggaacgctggactttccctttcaccatcaccccagagaacgctaatcggcgtcgccggtaggtctggtatcgctcaccgtcaactgtctctctccgtcagagcgattaacaccaatgaagatagccggaaagtcaaggtttatgcagagaacggcgctttcgatttgggagtgatggatccttcagtggagccatataaatttgcggagccaagaacaagtcataatgattcgaggaggaaaaccaagattgtgtgtaccattggaccttcctctagctctcgtgaaatgatttggaaactcgcggaagcaggaatgaatgtggctcgtttgaatatgtctcatggagatcatgcttctcatcagattactattgatcttgttaaagaatacaactctctctttgttgacaaagccattgctatcatgttggatacaaagggtcctgaggttcgaagtggggatgtacctcagccgatcttccttgaagagggtcaagagtttaattttaccatcaagagaggtgtctcaatgaaagacaccgtcagtgtcaactatgatgattttgttaacgatgtcgaagttggagacatacttttggtcgatggtggaatgatgtcactagctgttaagtccaagacgagcgatttggtgaaatgtgtagttattgacggtggagagcttcaatctagacgtcacttgaatgttcgaggaaagagtgctactcttccttccataacagacaaagattgggaagacatcaaatttggagtggacaaccaagttgatttctatgctgtctcttttgttaaggatgctaaagttgtccatgagttgaaaaactacctcaaaagctgcagtgcggatatctctgtgattgtgaaaattgaaagcgcagattctataaagaatcttccttccattatatctgcttgtgatggggcaatggttgctcgtggagatcttggagctgaacttcccattgaggaggttcccttgttacaggaggagataatcacaaggtgtaggaacattcataaaccagtgattgtcgccacaaacatgctagagagtatgattaatcatccaacacctacaagagctgaagtatctgacattgcaattgcagtgcgcgaaggagcagatgcaatcatgctttctggtgaaaccgcacacggaaagtttcctctgaaagctgttaacgtgatgcataccgtggctttgagaactgaggctagtctacctgttagaacctcagcaatccggaccactgcttacaagggtcgcatgggccaaatgtttgctttccatgcttctataatggcgaatacactgaacacaccgatcattgtgttcacaagaactggatccatggcagtgcttctgagtcactaccgcccgtcctcaacaattttcgccttcacaaaccagaggagaataatgcaaaggctggctctttaccaaggtgtcatgcctatatacatggagttttctgatgatgcagaagatacatatgcccgttccttgaaactcctacaggacgagaatatgcttaaggaaggacaacatgtaactcttgtccaaagtggtgcgcaacccatttggcgtgaagaatcaacacatctcatacaagtccgtaagattaagataggttgatgtttttcactactcgagcttctatatccctgactttatttttcttacacgatttgatccaatattgttttatgtcactcacagtgaaaccatatatatttgttttaagttcttgaaccacatgactgtaaaaacaaaacagtcttttcgatgaaaaaaaaaaaaaaa

SEQ ID NO: 70156 - protein, 571 aa, Brassica napus
MAATGQISTRMTVDRTLSSSRNAGLSLSPSPQRTLIGVAGRSGIAHRQLSLSVRAINTNEDSRKVKVYAENGAFDLGVMDPSVEPYKFAEPRTSHNDSRRKTKIVCTIGPSSSSREMIWKLAEAGMNVARLNMSHGDHASHQITIDLVKEYNSLFVDKAIAIMLDTKGPEVRSGDVPQPIFLEEGQEFNFTIKRGVSMKDTVSVNYDDFVNDVEVGDILLVDGGMMSLAVKSKTSDLVKCVVIDGGELQSRRHLNVRGKSATLPSITDKDWEDIKFGVDNQVDFYAVSFVKDAKVVHELKNYLKSCSADISVIVKIESADSIKNLPSIISACDGAMVARGDLGAELPIEEVPLLQEEIITRCRNIHKPVIVATNMLESMINHPTPTRAEVSDIAIAVREGADAIMLSGETAHGKFPLKAVNVMHTVALRTEASLPVRTSAIRTTAYKGRMGQMFAFHASIMANTLNTPIIVFTRTGSMAVLLSHYRPSSTIFAFTNQRRIMQRLALYQGVMPIYMEFSDDAEDTYARSLKLLQDENMLKEGQHVTLVQSGAQPIWREESTHLIQVRKIKIG

SEQ ID NO: 70157 - DNA, 1930 bp, Brassica napus
  CDS (109)..(1692)
cggtcaaatcccattcgcataaaaagcatctcctctccgatcgaattctctcactctgttcgccgccgaagatctgagatctctcctctctcctctctcacctcaaagatgcattcgagtcatctccttctcgaggaaccgatcaggatggcatcaatcctcgagccatccaaatctagcttcttcccagcattgactaagatcgtcgggactctcggtcccaaatcccgatccgtcgagactctctccggttgcctcaaatccgggatgtccgtggctcgatttgatttctcttggggagatgctgagtatcaccaggagacgctggataatctgaaaattgctgtgaagagcactaagaagctttgtgctgttatgcttgatactgtgggacctgagctgcaagttatcaacaagtctgggaaagctattactcttaaagccgatggacttgttactttgacacccagtcaagatcgagaagcgtcttctgaagtccttccgattaactttaatgggcttgccaaggcagtgaagaagggagacactatctttgttgggcaatacctattcactggtagtgaaacaacttcagtttggctcgaggttgatgaagttaaaggagatgatgtcatttgcctgtcaaggaatgctgctactcttgctggttctctcttcactctgcacgcctctcaagttcacatcgatctgccaactcttacggagaaagataaggaggttataagcacatggggagttcagaataaaatcgattttctctctttgtcttattgtcgtcatgcggaggatgttcgccagacccgcgaaatgcttaagaagttgggtgacctctctcaaacacaaatatttgccaagattgagaatgtagagggacttaaccactttgatgagattctacaagaagctgatggaattattctttctcgtgggaatttgggtattgatctacccccggaaaaggtgtttttgtttcaaaaggcggctctttacaagtgcaacatggctggaaaaccagccgttcttacccgtgtcgttgatagtatgactgacaacttgcgaccaactcgtgcagaggcaacagatgttgctaatgctgttctagatggaagtgatgcaattcttcttggtgctgagacccttcgcggtttataccctgttgagacaatatccactgtcggtagaatctgtgctgaggcagaaaaggttttcaatcaggacttgtacttcaagaagactgtcaagtatgtaggagaaccgatgtctcacttggaatccattgcttcttcagctgtacgggcagcaatcaaggttaaggcatctgtcattatatgcttcacctcttctggaagagcagcaaggttaattgccaaatacaggccaacaatgcccgttatttctgttgtcattccccgggttaagacaaatcagctgaaatggagctttagtggagcctttgaggcgaggcagtcacttattgtcagaggccttttccccatgctcgctgatcctcgtcacccagcggaatcaacaagtgcgacgaacgagtcagtcctcaaggttgcactagaccatggaaagcaagcaggagtgatcaaatcgcatgacagagtagtggtgtgtcagaaagttggtgatgcttctgtggtgaagatcatcgagctagaggattaacacaaaaatggaagaagaaaacaattgctatatttttcttacttcgagactgtgccggagtgagtatatttttatctacgggacttttggtttttgagatttgatgtctctaaatgattcccttctttttcctttcggtatacatttgggttgccttcagatttaaagccatgtttaaagagtatacaatgtctagcaaattattcaataaactgtaacatccaaaaaaaaaaaaaaa

SEQ ID NO: 70158 - protein, 527 aa, Brassica napus
MHSSHLLLEEPIRMASILEPSKSSFFPALTKIVGTLGPKSRSVETLSGCLKSGMSVARFDFSWGDAEYHQETLDNLKIAVKSTKKLCAVMLDTVGPELQVINKSGKAITLKADGLVTLTPSQDREASSEVLPINFNGLAKAVKKGDTIFVGQYLFTGSETTSVWLEVDEVKGDDVICLSRNAATLAGSLFTLHASQVHIDLPTLTEKDKEVISTWGVQNKIDFLSLSYCRHAEDVRQTREMLKKLGDLSQTQIFAKIENVEGLNHFDEILQEADGIILSRGNLGIDLPPEKVFLFQKAALYKCNMAGKPAVLTRVVDSMTDNLRPTRAEATDVANAVLDGSDAILLGAETLRGLYPVETISTVGRICAEAEKVFNQDLYFKKTVKYVGEPMSHLESIASSAVRAAIKVKASVIICFTSSGRAARLIAKYRPTMPVISVVIPRVKTNQLKWSFSGAFEARQSLIVRGLFPMLADPRHPAESTSATNESVLKVALDHGKQAGVIKSHDRVVVCQKVGDASVVKIIELED

SEQ ID NO: 70159 - DNA, 1903 bp, Brassica napus
  CDS (122)..(1618)
ttccctagtccccaaggcccaagccagatctctctctctctctctataaatctctctcggtctctactaccatctctgatccaacctatttccccattgaactcgctgttttcttccaaagatggcgatgatagagcaaaggccgaagacgaagatcgtgtgtaccgttggtcccgcttccagatccgttgagatggtcgagaagcttctcagggctggcatgaacgtcgctaggtttaacttctctcacggatctcatgagtaccaccaggagactctcgataatctccgtcaagctatgctcaacactggtatcctctgcgccgtcatgctcgataccaagggtccagagatccgaaccggattcttgaaagatgggaaaccaatccagttgaaacaaggccaagagatcaccatctccactgactacgacttgcagggagacgaggaaacaatctgcatgagctacaagaagttggctgaggatgtgaacccagggatggttatcctctgtgctgacggtacaatctcgttactggtcctctcctgtgacacagagaacggcacagtccgttgccgctgcgagaactctgccatgcttggtgagaggaagaacgttaatctcccaggtgttgttgtggacctcccaactctaactgagaaagacaaagaagacatcatgaagtggggagtcccgaatcagatcgatatgatcactttgtcttttgtcagaaaaggttcggacttggttcaggtcaggaaactgttaggagatcatgccaagaacattcttctcatgtcaaaggttgagaaccaagaaggtgtggcgaacttcgatgacattcttgtcaactccgacgcgtttatgattgcaagaggagatctcggcatggagatcccaatcgagaagatcttcctagctcagaaagtgatgatctacaaatgcaacatccagggaaaaccagtggtcacagcgactcagatgctcgagtccatgatcaaatcccctcgacccacaagagctgaagccactgacgtagcaaacgcagtcctcgacggcaccgactgtgtcatgctcagcggagaaaccgcagctggagcttaccctgagctagctgtacgcacgatggccaagatctgcgttgaagccgagagcacgcttgactacggagacgtcttcaagaggatcatgcagtactctccggttccaatgtccccgctggagtcactggcctcctctgcagtcagaacagctaactcggctagagccacgctcatcatggtcctaaccaggggaggaagcacggcgaggcttgtggctaaatacagaccagggatgcctattttgtcagtcgttgttcccgagatgaaaacagacttctttgactggtcttgcagcgacgaatcgccggcgaggcacagtctcatcttccgtgggttgattccggtgctgtacgcagggtctgctagagcctcgcatgatgagtccacagaagaagctattgagtttgcgactcagcatgggaaagagaagcagctgtgtaagactggagactctgttgttgctctgctccgagttggtaatgcttctctaatcaagatcttgaccgtcaagtgatgattgatgattcacgatctttaaaaaggagtcccgtttttggcgtttggcggttgggggaaacgcaactataatcggtttttgttatgaattttttttattcaagattgtgattacatatcttgagataggaaactcaagttctctttcttgctaattacaactactgtggtgaccagtgaatccacttacggctctcttttgttttggattattggttgtatggaactaatcaatcatacacgtatctattatcatgattttcttctgaaaaaaaaaaaaaaa

SEQ ID NO: 70160 - protein, 498 aa, Brassica napus
MAMIEQRPKTKIVCTVGPASRSVEMVEKLLRAGMNVARFNFSHGSHEYHQETLDNLRQAMLNTGILCAVMLDTKGPEIRTGFLKDGKPIQLKQGQEITISTDYDLQGDEETICMSYKKLAEDVNPGMVILCADGTISLLVLSCDTENGTVRCRCENSAMLGERKNVNLPGVVVDLPTLTEKDKEDIMKWGVPNQIDMITLSFVRKGSDLVQVRKLLGDHAKNILLMSKVENQEGVANFDDILVNSDAFMIARGDLGMEIPIEKIFLAQKVMIYKCNIQGKPVVTATQMLESMIKSPRPTRAEATDVANAVLDGTDCVMLSGETAAGAYPELAVRTMAKICVEAESTLDYGDVFKRIMQYSPVPMSPLESLASSAVRTANSARATLIMVLTRGGSTARLVAKYRPGMPILSVVVPEMKTDFFDWSCSDESPARHSLIFRGLIPVLYAGSARASHDESTEEAIEFATQHGKEKQLCKTGDSVVALLRVGNASLIKILTVK

SEQ ID NO: 70161 - DNA, 2063 bp, Glycine max
  CDS (192)..(1700)
ttgcataataacaagagtcgcatcgcatcacaaatcttttttgtctctctctacttttttgctttctttcttcttctgtttatcgcatcgcgtattggttggtcgaaaaacaaagagtgtgtgttgtgtggtttggtttggtttttcacttttcttcatctttttgcgagaagacacacacacagagagagatggctacgacgaggattgaggcagagaagaagccgaagacgaagatcgtgtgcactctgggccccgcatcacggtcggtcccaatgatcgagaagcttctgcgagcaggcatgaacgtggcgcgcttcaacttctcccatgggtcccacgagtaccaccaggaaaccctcgacaacctccgcgccgccatggagaacaccggtattctctgcgccgtcatgctcgacaccaaggggcctgagattcgaactggttttctcaaggacggtaagcctatccaactgatacaaggtaatgaaataaccatttccactgactatgacctaaagggagatgagaagacgatttgtatgagctacaaaaagctgcctgaggatgtgaagcccgggatggtcatactctgtgcggatggcaccatatcatttacagttttatcatgtgacaaacaagcaggcttggttcaatgccgatgtgagaactctgccactcttggcgagaggaagaatgttaatttgcctggagtgatagtggatctcccaactttgacagacaaggacaaggaagatatcttggcctggggaattccgaataaaattgacatgattgctctttcttttgttcgaaaaggttctgacctggtggaagtcaggaaagttctgggaaaacatgctaagaacattatgctcatgtctaaggttgaaaaccaagaaggggttgcaaattttgatgaaatccttgcaaattcagatgcatttatggtggcacgtggtgaccttggaatggaaattccaatagagaagatatttctcgcacagaaagtgatgatttacaagtgcaacatccaaggaaaaccagttgtcactgcaacccagatgttggagtcaatgatcaaatctcccaggccaaccagggccgaagctactgatgttgccaatgcagttctggatggcacagactgtgtgatgcttagtggtgaaaccgctgctggagcctatccagaccttgctgttcaaacaatggctaaaatatgcattgaagcagagagcacccttgactatggtgatgtgttcaaaaggattatggagcactcaccggtacccatgagcccattagagagtctagcttcttctgctgttagaacagccaactcggctagagcggctcttatcttggttttaactagaggagggagtactgcaaaattggtggcgaaatacaggccagggatgccaattctttccgtggttgttcccgagctcaagactgatagctttgattgggcatgcagtgatgaggcccctgcgagacatagccttatattccgcgggttggttcccgtgttgagtgcagcttctgctagagcttctcatgctgaaacaacagaagaagcaatagaattcgccatgcaacatgccaagtccaagggtctctgccacaacggggattcagtggtggcactgcatcgtgtgggcactgcatctatcatcaagatcttgactgtgaaatgatcacccccattacaaggaattcttctgctgtttatggcaaattttttggatggtgcaaaagaggtctcgatatacctcttcatatctacattggatgcaaacttcaattaaaagcatttattaggatcggttacctgtttttcacatatcatatattactttttttttttttttttgttacatttgccttatcattgtggcgagtagccacttgttttcatttgttaagattttgtacgaggcttttggtgaaccaaaaaactagccacttctggattttgaattttgcggtctaaagttgttttaacttttaattgagcagtcagcagtgtatgttttttgagaccgacacgcagcggccgc

SEQ ID NO: 70162 - protein, 502 aa, Glycine max
MATTRIEAEKKPKTKIVCTLGPASRSVPMIEKLLRAGMNVARFNFSHGSHEYHQETLDNLRAAMENTGILCAVMLDTKGPEIRTGFLKDGKPIQLIQGNEITISTDYDLKGDEKTICMSYKKLPEDVKPGMVILCADGTISFTVLSCDKQAGLVQCRCENSATLGERKNVNLPGVIVDLPTLTDKDKEDILAWGIPNKIDMIALSFVRKGSDLVEVRKVLGKHAKNIMLMSKVENQEGVANFDEILANSDAFMVARGDLGMEIPIEKIFLAQKVMIYKCNIQGKPVVTATQMLESMIKSPRPTRAEATDVANAVLDGTDCVMLSGETAAGAYPDLAVQTMAKICIEAESTLDYGDVFKRIMEHSPVPMSPLESLASSAVRTANSARAALILVLTRGGSTAKLVAKYRPGMPILSVVVPELKTDSFDWACSDEAPARHSLIFRGLVPVLSAASARASHAETTEEAIEFAMQHAKSKGLCHNGDSVVALHRVGTASIIKILTVK

SEQ ID NO: 70163 - DNA, 1976 bp, Glycine max
  CDS (116)..(1696)
cgtacaacactttctatatttatcgtccattctctctcactccataattgcttcttgctttggtcgatccattcggtgatcactgaccagtggtttggtgttgttgatagagaaaatgcattccagccctttgcttcttgaggaacccattaggatggcatccatccttgagccatccaagcctactttttttccggctatgacgaaaattgttggcacacttggtccaaagtcacgatcagttgatataatttcccattgccttgatgcaggaatgtctgtggcaaggtttgacttttcatggggtgatccagaataccatcaagagacattggaaaatttgagagttgctatcaaaagtaccaagaaactctgtgcggttatgctagatactgtgggtccagaattacagattgagaataagactgatcacccaatcacccttgaagcagacacattagttgtcttaactccagatcaaaataaagaagctagttcaaatctcttaccattaaattttaccgggctatcaaaggctgtgaagaagggtgatactatttttattggaaaatacttgtttactggaagtgaaacagcttctgtatggctggaggtcagtgaggtggaaggtgaggatgtcacctgtctggtaaaaaacactgccacactctctggatcattgtttactgtacatgtctctcagattcacatcgatcttcctactcttgctgataaagataaggaggtaataagcacatggggtgttcaaaacaatattgacttcctttcattatatacccggcacgttgaagatattcgtcatgcacgtgaatttctctctaaattgggtgacctgaagcagacacatatttatgcaaagattgaaaatatagagggaatgaaacattttgatgaaatattgagagaagcagatggtatcatcctcgctcgtggaaatttagggatagaactcccacctgagaaggttttcttattccaaaaggctgctatttacaagtgtaacatggttggaaagccagttgttgttacacgtgttgtggactctatgactgataatctaagacctactcgtgctgaagcaacagatgttgccaatgcagtgttggatggaagtgacgcaattctccttggagcagagaccctgcggggacaataccctgtagagaccatttctatagttggaaaaatatgtgctgaggcagagaaagttcataatcaagatttgtattttaagaaggctgtaaaatatgtgggagagccaatgagccatttggaatcaattgcttcctctgcggttcgggcagctatcaaggttaaggcctctgttattatttgcttcacttcatctggaagagctgcaagattgattgctaagtacagaccaaccatgcctgtgatatctgttgtcattcctcaattgaagacaaatcaactccgatggacgttcaccggtgcttttgaggctaggcaatctcttattgtgagaggtctttttcctatgctggcagatccacgacacccagctgagtccagaagtggaacaaatgaatcaattttgaaggttgctttagaccatggcaaggcttttggcatcataaagccacatgaccgagttgttgtctgccagaaagtagctgactcgtcagttgtgaagattcttgagctcgaagattgaatgattacaacttatgcgttatttgatgcataataataaagattcttgggcttgtgtttgataatcggagcgatatccagttttgaaatcaagcatggtgtgctgatctttcggctacttatgttgtttaatagtaaaccatccgaattcgaaaacgaaattgattatcttctaatgaattttatgctgaaaagaaaagtatgaattataagacaacttgtaaacactgagtgtgccagataaacttgtgagattattttagcttaaaaaaaaaaaaaaa

SEQ ID NO: 70164 - protein, 526 aa, Glycine max
MHSSPLLLEEPIRMASILEPSKPTFFPAMTKIVGTLGPKSRSVDIISHCLDAGMSVARFDFSWGDPEYHQETLENLRVAIKSTKKLCAVMLDTVGPELQIENKTDHPITLEADTLVVLTPDQNKEASSNLLPLNFTGLSKAVKKGDTIFIGKYLFTGSETASVWLEVSEVEGEDVTCLVKNTATLSGSLFTVHVSQIHIDLPTLADKDKEVISTWGVQNNIDFLSLYTRHVEDIRHAREFLSKLGDLKQTHIYAKIENIEGMKHFDEILREADGIILARGNLGIELPPEKVFLFQKAAIYKCNMVGKPVVVTRVVDSMTDNLRPTRAEATDVANAVLDGSDAILLGAETLRGQYPVETISIVGKICAEAEKVHNQDLYFKKAVKYVGEPMSHLESIASSAVRAAIKVKASVIICFTSSGRAARLIAKYRPTMPVISVVIPQLKTNQLRWTFTGAFEARQSLIVRGLFPMLADPRHPAESRSGTNESILKVALDHGKAFGIIKPHDRVVVCQKVADSSVVKILELED

SEQ ID NO: 70165 - DNA, 1965 bp, Glycine max
  CDS (127)..(1764)
ctgaccaccagaagaatgggacctggttggttgaaagtggagcgaagaaaactaacggagacttgtttggaagctagtctctggtgagagtgaaggcgcaccatcttcaccttgaagtcaacgatcatggcaaccattaacctttcttccgctactacgtctctcttccaatccaaacaccgaacgaaacgcattccacgcctccctacaatcgccagaataacaaaccacatcgaaggaactcatcttaactcccccaacggctctcccatccttggcaacgcaaacaattcccttgaggttccctccaataactatatctcgctacactcttcagacgtgcgtaggaaaactaagatcgtgtgcacgataggtccttctacgagctcacgtgatatgatatggaacctggctcaagctggaatgaacgtggcgcgtttgaacatgtcgcatggggaccacgcctcgcacctccaaaccattgatttggtgaaagaatacaattctcagtttcaagataaggttgtagccatcatgctcgacaccaagggtcctgaagttagaagtggggatgtagctcaacctattttacttaaagagggacaagaattctgtttcaccactatgagaggggttagcacacatgacacggttagcgtgaactacgatggctttgtgaatgatgtggagttcggagatgtgttgctggttgatggaggaatgatgtctcttgctgttaagtcaaagacaaaagacttggttaaatgtgaagttattgatggtggtgaactgaaatctaggcgtcatttaaatgtccgtggaaaaagtgcaacacttccttccataactgacaaggactgggaagatatcaagtttggggtggacaatcaagtagacttctttgctgtctcatttgtcaaggatgctagagtggtgcacgagttaaaacactacctcaaaagtcataatgccgatatacacgtgattgtaaaaattgaaagtgcagattccataccaaatctccattcgatactttctgcttcagatggggccatggtcgctcgtggggatcttggagctgaacttccaatagaggaagttcctttattgcaggaagacatcattcgaagatgtcaaattatgcaaaagcctgttattgtggcaacaaatatgcttgaaagcatgattaatcatcccacaccaacaagggcagaagtttcagacatcgcaattgcagtaagacaaggtgctgatgctatcatgctttcaggagaaactgcacatggaaaatttccattgaaagctgttaaagttatgcacacggtggctcttaggaatgaatccagtgttcaaagtggtgtttcttatccgagtcaactgagttcccatgaaagtcatatgggagaaatgtttgctttccatgcgacaacaatgtctaacactcttaatactcctattattgttttcaccagaacaggatccatggcaattcttttgagccattataggccttactcaacaatctttgcattcacaaatgaagcaagaattaagcagaggttggcgctttatcatggggttatgtccatatacatgcaattttcaaatgatgtagaagagaccttctctagagccctcaagctactattgagtaagagtcatttacacgagggacaacatgtcacacttgttcaaagtggagcacaaccaatctggcgtgaggaatccactcaccacatacaagttcgcaaggttcatggataaaattctatgaaggatctttgttcctcataagtgtacagtttttttccccactatcttgtaactattcatagtaatggctattcactatcttgtaactattcatagttatgactattatgcacttgaaacaccaaagttggatagtaaaggaattttcataatgcaaatagtgatttattgataaggaaaaaaaaaaaaaaa

SEQ ID NO: 70166 - protein, 545 aa, Glycine max
MATINLSSATTSLFQSKHRTKRIPRLPTIARITNHIEGTHLNSPNGSPILGNANNSLEVPSNNYISLHSSDVRRKTKIVCTIGPSTSSRDMIWNLAQAGMNVARLNMSHGDHASHLQTIDLVKEYNSQFQDKVVAIMLDTKGPEVRSGDVAQPILLKEGQEFCFTTMRGVSTHDTVSVNYDGFVNDVEFGDVLLVDGGMMSLAVKSKTKDLVKCEVIDGGELKSRRHLNVRGKSATLPSITDKDWEDIKFGVDNQVDFFAVSFVKDARVVHELKHYLKSHNADIHVIVKIESADSIPNLHSILSASDGAMVARGDLGAELPIEEVPLLQEDIIRRCQIMQKPVIVATNMLESMINHPTPTRAEVSDIAIAVRQGADAIMLSGETAHGKFPLKAVKVMHTVALRNESSVQSGVSYPSQLSSHESHMGEMFAFHATTMSNTLNTPIIVFTRTGSMAILLSHYRPYSTIFAFTNEARIKQRLALYHGVMSIYMQFSNDVEETFSRALKLLLSKSHLHEGQHVTLVQSGAQPIWREESTHHIQVRKVHG

SEQ ID NO: 70167 - DNA, 1825 bp, Helianthus annuus
  CDS (128)..(1624)
ataacaaaccaacccacccatttttattctcatttcacacatcaccgccgcccaatattcaatacattctcatcattttcaattctgtttctcaatttgattccattattccttcacaatcacactgatggatcaccagatgaagaggccgaagacgaagatcgtctgcacgttaggacctgcatctagatcagttccaatggtggagaagctcttaaaagcaggtatgaacgttgctcgcttcaatttctctcacggatcctatgaatatcatcaggaaacgcttgataatctccgcactgctatggataacaccggtatactctgtgcggttatgctcgacaccaagggtccagagattcgaaccgggtttttaaaagatggcaagccagttcagcttaaacagggtcaagaaatcacaatctctatcgattacaccatcaaaggcgatgaaaacatgatctgcatgagctacaagaagctagctcacgatgttaaaccacaaagtgtgattctctgtgcagacggcaccatttcgtttactgttctgtcttgtgacattgaaaacgggctagttcgttgtcgttgtgagaacactgcggttcttggtgaacgaaaaaacgttaatctacctggtgtgattgtggatctaccaacgctgactgagaaagacaaagaagatatcatgaaatggggtgttcctaataagattgatatgattgctttgtcgtttgtccgaaagggttcagaccttgtggaggttcgtaagctgttgggagtacatgctaaaaacattctgcttatgtctaaggttgaaaatcaagaaggggttgccaactttgatgatatcctagcgaactcagacgcgtttatggtggcgcgtggtgatctcgggatggaaattccgattgagaaaatatttctagctcagaaagtaatgatatacaagtgcaacctacaaggaaagccggttgtaaccgccactcaaatgctggagtcaatgatcaagtctccaaggcccactcgagccgaagccacagacgttgctaacgcggtcctcgatggaaccgactgcgtcatgcttagtggagaaaccgcagccggggcttacccagagctcgcagttcaaaccatggctaaaatctgcatggaagccgaaagcacaatagactataaagacgttttcaaaaggatcactgccaatgcaccggtccccatgagcccacttgaaagcttagcctcttctgcggttcgaaccgcgatctcatcaaaagcgagtctgatattggttctaaccagaggtggaagcactgcgaaactagtggctaagtaccgccccgggatgcctatactgtctgttgtggttccagaaatcaagaccgattcttttgactggtcttgtagtgatgagtcaccggctagacatagtctaatctttaggggtttggtcccggttttgattgcggggtctgctagagcttctcatgatgagtccactgaagaagctattgaatttgctttgcaacatgctaaagataaaggactatgcaagaatggtgattcggttgtggctctacatcgtgttggaaccgcgtctataatcaagatcgtgacagttaagtgattcttatgctatattgatattgtcgatttttgccctttcgatggcacacattgttacactggtaaactaaagttgattttggtatcgatgaactggatttgttatgagaaactacgtaacgagtaatgcatttttgtcgcgagtttgaataattgacattacttcgtgttttttggaaaaaaaaagaaaaaaaaaaaaaaa

SEQ ID NO: 70168 - protein, 498 aa, Helianthus annuus
MDHQMKRPKTKIVCTLGPASRSVPMVEKLLKAGMNVARFNFSHGSYEYHQETLDNLRTAMDNTGILCAVMLDTKGPEIRTGFLKDGKPVQLKQGQEITISIDYTIKGDENMICMSYKKLAHDVKPQSVILCADGTISFTVLSCDIENGLVRCRCENTAVLGERKNVNLPGVIVDLPTLTEKDKEDIMKWGVPNKIDMIALSFVRKGSDLVEVRKLLGVHAKNILLMSKVENQEGVANFDDILANSDAFMVARGDLGMEIPIEKIFLAQKVMIYKCNLQGKPVVTATQMLESMIKSPRPTRAEATDVANAVLDGTDCVMLSGETAAGAYPELAVQTMAKICMEAESTIDYKDVFKRITANAPVPMSPLESLASSAVRTAISSKASLILVLTRGGSTAKLVAKYRPGMPILSVVVPEIKTDSFDWSCSDESPARHSLIFRGLVPVLIAGSARASHDESTEEAIEFALQHAKDKGLCKNGDSVVALHRVGTASIIKIVTVK

SEQ ID NO: 70169 - DNA, 1575 bp, Glycine max
  CDS (38)..(1354)
ggaaaccggaggcagaaaactgaaaagcagagaaacgatggcctttgaatcggtgacgcagtcagcacctcctccgagatcaagaggaagaatcaccttgctcgaaaaccccaaaacacccttcgcccttgctcttctctttgccgacgccgtcctcgtctctctcataatcgccttcgtcccctatacgaagatagattgggacgcttacatgtcacaggttaccgggtttctcggtggagaacgagattaccgcaacctcaagggtgacactggtcctctcgtctaccctgctggctttctctacatttactctgctttccagtatcttaccgaaggacaagtttaccctgctcagattttgttcggagtgttgtatatcgttaacttggcaatcgttctcgccgtctatgtcaaaactgatgtggttccgtggtgggcactttgcttgctttctctgtcgaaaagagtgcattctatcttcgtgcttcgtttatttaatgactgtgtggccatgacactttttcatgctgcattgctcttactcgtgcaccgtaggtggaatcttgggttgattttgtttagtggagctgtttcggtgaagatgaatgtgcttctttatgctcctcctttgctgcttctcatgctgaaggctatggacatcagtggcgtgttattggcattatctggtgcagcactggttcagatattactgggacttcctttcctggtttcatacccagttacatacatatcaagagccttcaaccttggccgtgtcttcatccatttctggtctgttaacttcaaattcatccctgaaccagtatttgtgtccaagggatttgcaatctttttgttggctgctcacctcatatcacttgcttcatttgcgcattatagctggtgcaaacatgaaggagggctttgcaacttcctgcattccagatatgtctttatgagaatgaagtttgcacttttcttctcttcctctttttctaaggtcggcaagagcagttcatcatccctcaagatccttaataaagaacatattgtgacaactatgtttgttgggaacttcattggcattgtatgtgctcggtcgttgcattatcagttctatttgtggtacttctatagcttgccctacttgttgtggagaacgaattaccctacattgctgcgtttgattttgttcgtgggagtggagctgtgctggaatatctatccttcgaacagcctttcttcagcgttacttctttgtcttcacacaattattctctggggtttgtggtctgctccacctgagtatccttatgaagaaaataaaccatcctctcacaaaaacaaatagaagttcaaatttcaaaggttgctctcctattttgtggaggaaaaaggatgacttggacaaatgagttttgattttccccttatcactcctttccctttgatgtagatgtttgtgatgtatcttggagcaagcctaaggacttggatgtaaaacagaatataggagcgacaattctttagatattttgatttttttttttcacttccaaaaaaaaaaaaaaa

SEQ ID NO: 70170 - protein, 438 aa, Glycine max
MAFESVTQSAPPPRSRGRITLLENPKTPFALALLFADAVLVSLIIAFVPYTKIDWDAYMSQVTGFLGGERDYRNLKGDTGPLVYPAGFLYIYSAFQYLTEGQVYPAQILFGVLYIVNLAIVLAVYVKTDVVPWWALCLLSLSKRVHSIFVLRLFNDCVAMTLFHAALLLLVHRRWNLGLILFSGAVSVKMNVLLYAPPLLLLMLKAMDISGVLLALSGAALVQILLGLPFLVSYPVTYISRAFNLGRVFIHFWSVNFKFIPEPVFVSKGFAIFLLAAHLISLASFAHYSWCKHEGGLCNFLHSRYVFMRMKFALFFSSSFSKVGKSSSSSLKILNKEHIVTTMFVGNFIGIVCARSLHYQFYLWYFYSLPYLLWRTNYPTLLRLILFVGVELCWNIYPSNSLSSALLLCLHTIILWGLWSAPPEYPYEENKPSSHKNK

SEQ ID NO: 70171 - DNA, 1437 bp, Brassica napus
  CDS (54)..(1259)
tcgtcctctctcttagcatcagtcaactcattgtttacatctgttcatctactatggcgacgaagagaagcgttggaacgttgaaggaagctgatctgaagggaaagagcgtgttcgtgagggttgatctcaacgttcctttggatgataactctaacatcactgatgacaccaggattcgtgccgctgttcctaccgttaagtacttgatggaaaacggatctagagttgttctctgcagtcacttgggtcgtccaaaaggtgttacccctaaattcagcttaaagcctcttgtgccgaggttgtctgagcttcttgggattgaggttgtaatggcaaatgactctattggtgaggaagtccagaaactagtcgcaggactacctgaaggaggtgttctgctattggagaatgtgaggttctacaaggaagaagagaagaacgaccctgaatttgccaagaagctcgctgcccttgctgatgtctatgtcaacgatgctttcggaactgctcacagagcccatgcttccactgagggagttgccaaatacttgaagccttctgtcgctggtttcctcatgcagaaggaacttgattacctcgtcggagctgtggtaaaccccaagaatccttttgccgccattgttggaggttcaaaggtttcgacgaagattggtgtcattgagtcgctcctgtccaccgttgacatccttcttcttggtggaggtatgatttatactttctacaaggcacaaggacactctgtcggatcttctcttttggaagaggacaagcttgacttggccaggtcgctcatggagaaggccaaagccaaaggtgtctctcttttactcccaaccgatgtggttattgctgacaaattcgctcctgatgctaacagcaagatagtgccggccacggcaatcccagatggctggatgggactagatattggtccagactccatcaagacattcagcgaagcgctggacacaaccaagaccatcatctggaatggtcccatgggtgtttttgaatttgaaaagtttgcagctggaactgaggctgtagcaaagcagctggcggagctgagcggaaagggagtgaccacaatcataggaggaggtgactctgtcgctgccgttgaaaaggttggtttggctgacaagatgagtcacatctctacaggaggcggtgcaagtttggagcttctagagggaaagccactcccaggagtcctcgctctcgacgacgcttgagaatattttaagttcctgtccatgttatttattatacatcgtgtaccaagtcgtctggttttcttgtagccagagcaagccattaatattgtcagcttgagagttctctacggctttcttttagtttggagcctatttaataataaagagatgaaactctgagtaaaaaaaaaaaaaa

SEQ ID NO: 70172 - protein, 401 aa, Brassica napus
MATKRSVGTLKEADLKGKSVFVRVDLNVPLDDNSNITDDTRIRAAVPTVKYLMENGSRVVLCSHLGRPKGVTPKFSLKPLVPRLSELLGIEVVMANDSIGEEVQKLVAGLPEGGVLLLENVRFYKEEEKNDPEFAKKLAALADVYVNDAFGTAHRAHASTEGVAKYLKPSVAGFLMQKELDYLVGAVVNPKNPFAAIVGGSKVSTKIGVIESLLSTVDILLLGGGMIYTFYKAQGHSVGSSLLEEDKLDLARSLMEKAKAKGVSLLLPTDVVIADKFAPDANSKIVPATAIPDGWMGLDIGPDSIKTFSEALDTTKTIIWNGPMGVFEFEKFAAGTEAVAKQLAELSGKGVTTIIGGGDSVAAVEKVGLADKMSHISTGGGASLELLEGKPLPGVLALDDA

SEQ ID NO: 70173 - DNA, 1432 bp, Brassica napus
  CDS (39)..(1244)
ttacatccactcattgttttcttttttgctcatctactatggcgacgaagagaagcgttggaactttgaaggaagcggatctgaagggaaagagcgtgttcgtgagggttgatctcaacgttcctttggatgataactctaacatcaccgacgacactaggattcgtgccgctgttcccaccatcaagtacttgatgggtaacggatctagggttgttctctgcagtcacttgggccgcccaaaaggtgttacccctaaattcagcttgaagcctcttgtgccgagattgtctgagcttcttggtgttgaggttgtgatggcaaatgactctattggtgaggaagtccagaaactggttgcaggactacctgaaggtggagttcttctcttggagaacgtgaggttctacaaggaagaagagaagaacgaccctgagtttgccaagaagcttgctgcccttgctgatgtctacgtcaacgatgctttcggaactgctcacagagctcatgcttctaccgagggagttgccaaatacttgaagccttccgttgccggtttcctcatgcagaaggagcttgattaccttgtcggagctgtggcaaaccccaagaagccttttgctgccattgtcggaggctcaaaggtttcgacaaagattggtgtcattgagtcgctcttgtccaccgttgacatcctcttgctcggtggaggtatgattttcactttctacaaggcgcaaggacattcggttggatcttcccttgtggaagaggacaagcttgacttggccaagtcactcatggagaaggcgaaagccaaaggtgtctctctgttgctcccaaccgatgtggttattgctgataagttcgctcccgatgctaacagcaagatagtgccagccacggcaatcccagatggctggatgggactcgatgttgggccagactctatcaagacattcagcgaggctctggacacaacccagaccatcatctggaatggtcccatgggtgtttttgaattcgaaaagtttgcagctggaactgaggccgtagcaaagcagctagcggagctgagcggaaagggagtgaccacaatcataggaggaggtgactctgtggctgccgtggagaaggttggtttggctgacaagatgagtcacatctctaccgggggaggtgcaagtttggagcttctagagggaaagccacttccaggagtcctagctcttgacgacgcgtgaatttcatctctcttgtgatatgtgatatgtgatatgtattacaagtcttatgcttttcttatgaccagattagcaaagcccttgtacttgtccgcttgagattttctttctacggctctttttcgagttttttgcttggagcctttttaataaaagaaagagattaaactctgaaaaaaaaaaaaaaa

SEQ ID NO: 70174 - protein, 401 aa, Brassica napus
MATKRSVGTLKEADLKGKSVFVRVDLNVPLDDNSNITDDTRIRAAVPTIKYLMGNGSRVVLCSHLGRPKGVTPKFSLKPLVPRLSELLGVEVVMANDSIGEEVQKLVAGLPEGGVLLLENVRFYKEEEKNDPEFAKKLAALADVYVNDAFGTAHRAHASTEGVAKYLKPSVAGFLMQKELDYLVGAVANPKKPFAAIVGGSKVSTKIGVIESLLSTVDILLLGGGMIFTFYKAQGHSVGSSLVEEDKLDLAKSLMEKAKAKGVSLLLPTDVVIADKFAPDANSKIVPATAIPDGWMGLDVGPDSIKTFSEALDTTQTIIWNGPMGVFEFEKFAAGTEAVAKQLAELSGKGVTTIIGGGDSVAAVEKVGLADKMSHISTGGGASLELLEGKPLPGVLALDDA

SEQ ID NO: 70175 - DNA, 1641 bp, Glycine max
  CDS (194)..(1399)
ccccaaacagggctaatcccaaaaaaaggccacaaccctctcacacgtgtcgttcacacgagtgccacccacctctctctataaatctttctagaaagttccctcactccctgaacctgatcgatctctttaccagttgccacactacaccgagattccccctaaacccgtttgcgttgttgtttgcgaagaaatggcgactaagaggagcgtgggaacgttgaaggagggtgatttgaaagggaagagggtgttcgtgagggtcgatctgaacgtgcctttggatgacaaccttaacatcaccgatgacactagagtccgtgctgctgttcccaccatcaagtacttaactggtcatggagccaaagtgatcctttctagccacttgggacgtcctaaaggtgtaacacctaaatacagtttgaagcctcttgtgccaaggctgtctcaacttctcggaattgaggttacgatggcaaatgactctattggggaggaagttgagaagttggttgcacaacttccagaaggtggtgttttgcttctagagaatgtgaggttctataaggaggaagagaagaatgaccctgagtttgcaaagaagttggcttctcttgctgatctctacgtgaatgatgctttcggcactgcccacagagctcatgcttctacagaaggagtggccaaatacttgaagccctctgttgcaggattccttatgcagaaggaacttgactatctagttggagctgtgtcaaaccccaagagaccatttgctgctatcgttggtgggtcaaaggtgtcttccaagattggagttattgagtccttgttggagaaagttaacgttctcttgcttggtggaggaatgatctttaccttttacaaggctcagggttattcagttggttcatctcttgtggaggaagacaagcttagccttgcaactacacttctcgaaaaggccaaggctaaaggggtttctttgttgcttccaactgatgtggtcatagcagacaagtttgctgctgatgctaacagcaagactgtgccagcatcaagcatcccagacgggtggatgggattagatattggtcccgattccatcaagacatttggtgaagcattggataagacccagaccgtcatttggaatggaccaatgggtgtttttgagtttgataagtttgccacaggaacagaggccatagccaagaaactggcagagctgagtgggaagggagtaacgaccatcattggaggaggtgactctgttgccgctgtggagaaggttggtcttgcagacaagatgagccacatctccactggtggtggtgccagcttagagcttcttgaggggaagcaactccctggtgtccttgcccttgatgatgcttgagtaaacatcactagttcctctgtaatttgtgctttatattattattatggttggatttcagccaacagtggattgaggtacaatgagagagctcttgttgctcctgtagaggcttaatataggttaggtttcgaaataagagggttttgtggcatccttggtgttgcattgagctttgatctaattgttcttgaacaatgttcatttcaaaaggagttttactttgttaaaaaaaaaaaaaa

SEQ ID NO: 70176 - protein, 401 aa, Glycine max
MATKRSVGTLKEGDLKGKRVFVRVDLNVPLDDNLNITDDTRVRAAVPTIKYLTGHGAKVILSSHLGRPKGVTPKYSLKPLVPRLSQLLGIEVTMANDSIGEEVEKLVAQLPEGGVLLLENVRFYKEEEKNDPEFAKKLASLADLYVNDAFGTAHRAHASTEGVAKYLKPSVAGFLMQKELDYLVGAVSNPKRPFAAIVGGSKVSSKIGVIESLLEKVNVLLLGGGMIFTFYKAQGYSVGSSLVEEDKLSLATTLLEKAKAKGVSLLLPTDVVIADKFAADANSKTVPASSIPDGWMGLDIGPDSIKTFGEALDKTQTVIWNGPMGVFEFDKFATGTEAIAKKLAELSGKGVTTIIGGGDSVAAVEKVGLADKMSHISTGGGASLELLEGKQLPGVLALDDA

SEQ ID NO: 70177 - DNA, 1838 bp, Glycine max
  CDS (167)..(1618)
cgataagagaaatccaaaatcctctcaccacacccaatcgttcccgcgttgtcctccacgtcctcatcctttcatcacctctctcttccaccaaacaataaaaacctccaaacccactccagttaactccatacactctctctctctctctctctctctctctacaatggcctcagccgcagcccccacaactttctctctcctccactccaccaccccggcctcctcctcctccgccacctccgcctccccctcgcgcgtgcagctctcctcctccctccgctcgcgcccgctcgcgcgccgccttggcttcgccgcggcggacccgctgctcgcggcgaatgtcgcagcgcgcgtcgcggcggtgagaggaggaaagggcgcgaggggggtggtgtcgatggcgaagaagagcgtgggggagctgagcgcggcggacctgaaggggaagaaggtcttcgtcagggccgacctcaacgtcccgctcgacgacaaccagaacatcaccgacgacaccagaattcgcgccgccattcccaccatcaaacacctaatccaaaacggcgccaaagttattctctccagccacttggggaggccgaagggtgtcactcccaaatacagcttggcacctcttgtgccccggctttctgagctcattggtatccaggttgtcaaggctgaagacagtattggtccagaagtagaaaagttggtggcttctcttccagatggaggtgttcttcttctagaaaatgtgaggttttacaaggaggaagaaaagaatgatcccgagcatgcaaaaaagcttgcctctctggcagatctgtttgtgaatgatgcatttggtactgctcacagggcacatgcatcaacagagggtgttactaaatacctgaagccatctgttgctggttttcttttgcaaaaggaacttgattaccttgttggggcggtatcaagccccaaaaggccatttgctgccattgttggtggttccaaggtctcatctaaaattggagtgattgagtcacttttggaaaaagttgacattcttcttcttggtggaggaatgatcttcacattttacaaggcacaaggtctttcagtgggttcatcccttgtagaagaagataagttggatcttgctacatcactacttgcaaaagccaaggaaaagggggtgtctctcttgttaccaagtgatgtggtgattgcagacaaatttgcccccgatgcaaacagcaaggtcgtgccagcatctgccatccctgatggctggatgggattggatattggtccagattctgttaaatcattcagtgaagcattggatactacccaaaccatcatatggaatggaccaatgggagtgtttgagtttgacaagtttgctgttggtacagaggctattgcaaagaagctggctgatctcagtggaaagggggtgaccacaattatcggaggaggagattctgttgcagctgtggagaaagtaggagttgctagtgtcatgagccacatatctactggtggtggtgccagtttggagttattggaaggcaaagagcttccaggagtccttgctctcgatgaagccgtcccagttgccgtgtaagacaattttcagcttggaaaatttttccatcctcagatttcggtgttgtcaatcttgtaaaagagcatatgttgtaggacccttcggagtctgttagtgtaaattttatcatgcttgagttattattggcttcacacataaattgcgtgtaactgtaaaccctggctgagagccataaattcgaataaatcttttagttgctgccaaaaaaaaaaaaaaa

SEQ ID NO: 70178 - protein, 483 aa, Glycine max
MASAAAPTTFSLLHSTTPASSSSATSASPSRVQLSSSLRSRPLARRLGFAAADPLLAANVAARVAAVRGGKGARGVVSMAKKSVGELSAADLKGKKVFVRADLNVPLDDNQNITDDTRIRAAIPTIKHLIQNGAKVILSSHLGRPKGVTPKYSLAPLVPRLSELIGIQVVKAEDSIGPEVEKLVASLPDGGVLLLENVRFYKEEEKNDPEHAKKLASLADLFVNDAFGTAHRAHASTEGVTKYLKPSVAGFLLQKELDYLVGAVSSPKRPFAAIVGGSKVSSKIGVIESLLEKVDILLLGGGMIFTFYKAQGLSVGSSLVEEDKLDLATSLLAKAKEKGVSLLLPSDVVIADKFAPDANSKVVPASAIPDGWMGLDIGPDSVKSFSEALDTTQTIIWNGPMGVFEFDKFAVGTEAIAKKLADLSGKGVTTIIGGGDSVAAVEKVGVASVMSHISTGGGASLELLEGKELPGVLALDEAVPVAV

SEQ ID NO: 70179 - DNA, 1322 bp, Hordeum vulgare
  CDS (14)..(1051)
tagagcggacgagatgaggatgtcgctgctgagatccgcgtcgcagcacctgcgccgccaccgctgcgactactcctcctcctcctccgccaccgcctcgccggagcggaaggtggccatcctcggcgcggcgggcggcatcggccagccgctggcgctgctcatgaagctcaacccgctcgtctcctccctctccctctacgacatcgccgccacgcccggcgtcgccgccgacgtctcccacatcaacacccgcgccctcgtcaaggggttcgtcggggacgaccagctcggggaggcgctggagggcgccgacctcgtcatcatccccgccggggtgccccggaagcccggcatgaccagggacgacctcttcaagatcaacgccgggatcgtcaagggcctctgcaccgccatcgccaggcactgccccaacgctctcgtcaatatgatcagcaaccctgtcaactcgacagtcccgattgcggcagaggtgtttaagaaggctggtacttatgatgagaagaagctgtttggtgtgaccactcttgatgttgttcgtgctaaaacattctacgctggaaaggcaaacgtgccagttactggggtgaatgttcctgttgttggtggccatgctggtatcactatcctgccactgttctcacaggctactcctgcaagtaatgcattgtcccatgaggaccttgtggccctcacgaagaggacacaggatggtgggacggaagttgttgaagcaaaagctggaaagggctcagcaacattgtcgatggcatatgctggtgcagttttcggagacgcatgcttgaaggggctcaatggagttcctgacatcatagagtgctcttttgtccaatcaactgtaacagagttgccattctttgcctccaaggtaaggctgggcaagagcggagtggaggaagtgcttgggctgggcgagctatcggccttggagaaggaggggctggaaagcctcaagggcgagctgctgtcttccatcgagaagggtgtcaagtttgcgcaggagagctaggcggcgacctgcccagcctataatggttcacacttgaactcatgcaatttttgttcgaccgcttccgttgccccccaatccggttatgccgtggggcatcgaggcatcgtcgtgctccacaataaaatgtactactggctttgatgtcgccagactgaactaaacctgtagtgccagaaacagcggacaccggtgcctatgtgtttgtagcattcgtacccgagatcacgaagggaaaccgaagattctatctgggaaaaaaaaaaaaaaa

SEQ ID NO: 70180 - protein, 345 aa, Hordeum vulgare
MRMSLLRSASQHLRRHRCDYSSSSSATASPERKVAILGAAGGIGQPLALLMKLNPLVSSLSLYDIAATPGVAADVSHINTRALVKGFVGDDQLGEALEGADLVIIPAGVPRKPGMTRDDLFKINAGIVKGLCTAIARHCPNALVNMISNPVNSTVPIAAEVFKKAGTYDEKKLFGVTTLDVVRAKTFYAGKANVPVTGVNVPVVGGHAGITILPLFSQATPASNALSHEDLVALTKRTQDGGTEVVEAKAGKGSATLSMAYAGAVFGDACLKGLNGVPDIIECSFVQSTVTELPFFASKVRLGKSGVEEVLGLGELSALEKEGLESLKGELLSSIEKGVKFAQES

SEQ ID NO: 70181 - DNA, 1222 bp, Brassica napus
  CDS (45)..(1070)
gcttcaccacaaacactaaaaagacatctcttctctcctgcaaaatgttcagatccgcgcttgtccgatcctccgcctcggcgaagcagtcgcttctccgccgcagcttctcttccggatccgtccccgagcgtaaagtcgccatcttgggagccgccggtggaatcggtcagcctctggctctcctcatgaaactcaatcccctcgtctcaagcctctccctttacgatatcgccaacacacccggagtcgccgctgacgtcggtcacatcaacaccagatctcaggtggttgggtacatgggagatgataacttggcgaaagctcttgaaggagctgacctcgttatcattccagctggtgtccccaggaagcctggtatgacccgtgatgatcttttcaacatcaatgctggcattgtcaagaacctttgctctgccatcgccaagtactgccctcatgcacttgttaatatgattagcaacccggtcaactctactgttccgattgcagcagagattttcaagaaggctggtatgtacgatgaaaagaagctgtttggtgttaccactcttgacgttgttagggccaagactttctatgctggaaaggctaatgtccctgttgcagaagttaatgttccggtgattggtggtcatgctggggttacaatcctcccactcttctctcaggccactccccaagctaacttgtcaggtgacgtgctcactgccctcaccaagcgtactcaagatggaggtacagaagttgtggaggctaaagcagggaaaggttcagctacattgtcaatggcgtatgctggagcactattcgctgacgcatgcttgaagggactcaatggtgttccagatgtagtcgaatgctcatacgtgcagtccacaatcactgagcttcctttctttgcctcaaaggtgaggttggggaagaacggtgttgaggaggttcttgatttggggccactctctgactttgagaaggaaggcttggaagcattgaaaccggaactcaagtcttccattgagaagggagttaagtttgccaaccaatgagttaaaccggtttgactcggttatgtttctttccaattttccggctagagctggccttccataaaatccatgattgagtcttacttttttattttcaaacaatgtattttgcgggtaataaatgacactctcacaaacaaaaaaaaaaaaaa

SEQ ID NO: 70182 - protein, 341 aa, Brassica napus
MFRSALVRSSASAKQSLLRRSFSSGSVPERKVAILGAAGGIGQPLALLMKLNPLVSSLSLYDIANTPGVAADVGHINTRSQVVGYMGDDNLAKALEGADLVIIPAGVPRKPGMTRDDLFNINAGIVKNLCSAIAKYCPHALVNMISNPVNSTVPIAAEIFKKAGMYDEKKLFGVTTLDVVRAKTFYAGKANVPVAEVNVPVIGGHAGVTILPLFSQATPQANLSGDVLTALTKRTQDGGTEVVEAKAGKGSATLSMAYAGALFADACLKGLNGVPDVVECSYVQSTITELPFFASKVRLGKNGVEEVLDLGPLSDFEKEGLEALKPELKSSIEKGVKFANQ

SEQ ID NO: 70183 - DNA, 1319 bp, Brassica napus
  CDS (104)..(1126)
gtgagcttcaccacataagcataaaaaagagcatctccttagatttgcttccttctctcctccagattcctctcgagcgtaaaccctagcttccctctccaaaatgttcagatccgtcgtcgtccgttcctcttcatcggcgaagcaatcgcttctccaccgcagcttctcctcctccgtccccgagcgcaaagtcgccatcctcggggccgccggtggaatcgggcagcctctcgctctcctcatgaagctcaaccccctcgtctcaagcctctccctcttcgatatcgcaaacacccctggagtcgccgctgatgtcggtcacatcaacaccagatctgaggtggttggatacatgggagatgatgaattggcgaaagctcttgcaggagctgacctcgttatcatccctgctggtgtccccaggaagcctggcatgactcgtgatgatcttttcaacatcaacgctggtattgtcaagaacctttgctctgccatcgccaagtactgccctcatgcacttgttaacatgatcagcaacccagtgaactccactgttccaattgcagctgagatattcaagaaggctggtatgtacgatgagaagaagttgtttggtgtcaccactcttgacgttgttagggccaagactttctacgctggaaaggctaatgtccctgttgctgaagttaatgttccggtgattggtggtcatgctggggttacaattctcccactcttctctcaggccactcctcaggccaacttgtctaatgatgtactcaccgctctcaccaagcgtacccaagatggaggtaccgaagtcgtggaggctaaagcaggaaaaggttcagctacattgtcaatggcctatgctggagcactatttgctgatgcatgcttgaaaggactcaacggagttccagacgttgtggaatgttcatacgtgcagtccaccatcactgagcttcctttctttgcctcaaaggtgaggttggggaagaacggtgtggaggaggttcttgatttggggccactctcagactttgagaaacaagggttggaagcactgaagccagaactcaagtcttccatcgagaagggtgttaagtttgcaaaccaatgagttaaatcgatttgagtcgggttatttttccaattttccggttatattatcgcccttcattgggttgcatcaataaaattcatgtgttgaggctttttgggttctttcccaaagcacagagataaaaaaaactgtaacatgtaaggtttctttcttatataacaatgtttttttctgtcaaaaaaaaaaaaaa

SEQ ID NO: 70184 - protein, 340 aa, Brassica napus
MFRSVVVRSSSSAKQSLLHRSFSSSVPERKVAILGAAGGIGQPLALLMKLNPLVSSLSLFDIANTPGVAADVGHINTRSEVVGYMGDDELAKALAGADLVIIPAGVPRKPGMTRDDLFNINAGIVKNLCSAIAKYCPHALVNMISNPVNSTVPIAAEIFKKAGMYDEKKLFGVTTLDVVRAKTFYAGKANVPVAEVNVPVIGGHAGVTILPLFSQATPQANLSNDVLTALTKRTQDGGTEVVEAKAGKGSATLSMAYAGALFADACLKGLNGVPDVVECSYVQSTITELPFFASKVRLGKNGVEEVLDLGPLSDFEKQGLEALKPELKSSIEKGVKFANQ

SEQ ID NO: 70185 - DNA, 1320 bp, Brassica napus
  CDS (61)..(1092)
agaatcgcatcttagcttttgcttccttctcgagagtaaaccctagatcccatctccaagatgttcagatccgttatcgtccgttcttcttcatcggcgaagcaatcgcttctccgccgcagcttctcctcctcctcctcctccgtgcccgagcgcaaagtcgccatcctcggcgccgccggtggaatcgggcagcctctcgctctcctcatgaagctcaaccccctcgtctctagcctctcactcttcgatatcgctaacacccctggagtcgccgccgatgtcggtcacatcaacaccagatctgaggtggttggatacatgggagatgatgaattggcgaaagctcttgaaggagctgacctcgttatcattcctgctggtgttcccaggaagcctggtatgacccgtgatgatcttttcaacatcaatgctggtattgtcaagaacctctgctctgccatcgccaagtactgccctcatgcacttgttaacatgatcagcaaccctgtgaactctactgttccaattgcagctgagatcttcaagaaggctggtatgtacgatgagaagaagttgtttggtgtcaccactcttgacgttgttagggccaagactttctacgctggaaaggctaatgttcctgttgcagaagttaacgttcctgtcattggtggtcatgctggggttacaattctcccactcttctctcaggccactcctcaagccaacttgtcgagtgacgtactcaccgctctcaccaagcgtacccaagatggaggtaccgaagtcgtggaggcaaaggcaggaaaaggttcagctactttgtcaatggcctatgctggagcactattcgctgatgcatgcttgaaaggactcaacggagttccagatgttgtggaatgctcatacgtgcagtccaccatcactgagcttcctttctttgcctcaaaggtgaggttggggaagaacggtgtggaggaggttcttgatttggggccactctcagacttcgagaaagaagggttggaagcactgaagccagaactcaagtcttccatcgagaagggtgttaagtttgccaaccaatgagttaaatcgagttgagtcggttatttttccaattttccggttatattctcgccctacattgggttgcatcaataaaattcatgtgttgaggctttttgggctctttcccaaagcacagagataaaaactgtaacatgttagcatgtaaggtttctttcttttgtaacaatgatatttctgtcataatcatcagatcaaaagtctgcttgattccaaaaaaaaaaaaaa

SEQ ID NO: 70186 - protein, 343 aa, Brassica napus
MFRSVIVRSSSSAKQSLLRRSFSSSSSSVPERKVAILGAAGGIGQPLALLMKLNPLVSSLSLFDIANTPGVAADVGHINTRSEVVGYMGDDELAKALEGADLVIIPAGVPRKPGMTRDDLFNINAGIVKNLCSAIAKYCPHALVNMISNPVNSTVPIAAEIFKKAGMYDEKKLFGVTTLDVVRAKTFYAGKANVPVAEVNVPVIGGHAGVTILPLFSQATPQANLSSDVLTALTKRTQDGGTEVVEAKAGKGSATLSMAYAGALFADACLKGLNGVPDVVECSYVQSTITELPFFASKVRLGKNGVEEVLDLGPLSDFEKEGLEALKPELKSSIEKGVKFANQ

SEQ ID NO: 70187 - DNA, 1522 bp, Brassica napus
  CDS (89)..(1285)
ctctctctcactcactcaaaccctcgaaagcctgcgaagaaaactcttgaagcgtctctatctctctcgtcttgagctttcctcaaagatggcagcaacatcagcagcttcttcgatttcaattggatcaaacctttccagagccaccagctcctcctcaagggcacaagctgttaactttaactactctctccctcgtttcaccgctctgagatcatccactctcctctctggaccagaatcctcatctttcgccaagtctctccgcggttccgtaatgaaatcccaatcaaccgacacgaagccgtacggattgaacatcaacgcatcgtacaaagtggcggtcctcggtgctgccggagggatcggtcagcctctgtcacttctcatcaaaatgtctcctctcgtctccaccctccacctctacgatatcgccaacgtcaagggagtcgccgctgatttgagccactgcaacactccctctcaggttcgtgatttcaccggaccggctgagctggctgattgtttgaaagatgtcaacgtcgttgtcatccctgctggtgtgccgagaaagcccggtatgacccgtgacgatctcttcaacatcaacgccggtatagtgaagacgcttgttgaggctgtcgctgataactgtcctaacgcgttcatccacatcatcagcaaccctgttaactccaccgtccccattgctgctgaggtgttgaagaagaaaggtgtctatgatcccaagaagctctttggtgtcaccactttggatgttgtgagggctaacacctttgtttctcagaaaaagaacttgaagctcatcgatgtcgatgttcccgtcatcggtggccacgctggaatcaccattctgcctcttctatccaagaccaagccttctgtcagcttcactgacgaagagatcgagaaactcactctgaggattcagaacgctggaaccgaggttgtggatgctaaggcgggtgctggctcggctactttgtcgatggcctatgccgcagcgagatttgtggagtcgtctcttcgtgctcttgacggagatggagatgtttacgagtgctcgttcgtggactccactctcactgatcttcctttctttgcatcacggatcaagattgggaggaacggagttgaagctgtgattgagtctgacctccaagggctgactgagtacgagcagaaggcactagaagctcttaagccagaactgaaagctagcatcgaaaagggtgttgcattcgcaaacaaacctgctaactaagatctttgatctcatctgagagaaacatgcttctacattcgagaggataacagtttccttctgatcattttgagttttgttttgttttatttttgttgcatcggcgagacattttctggttgtagaataaagaatgtattagcttcttcggttctgaagatgttggatacacgacattgaatcagattttatgatgaatcacaccaaatatcatcttggttttaaaaaaaaaaaaaa

SEQ ID NO: 70188 - protein, 398 aa, Brassica napus
MAATSAASSISIGSNLSRATSSSSRAQAVNFNYSLPRFTALRSSTLLSGPESSSFAKSLRGSVMKSQSTDTKPYGLNINASYKVAVLGAAGGIGQPLSLLIKMSPLVSTLHLYDIANVKGVAADLSHCNTPSQVRDFTGPAELADCLKDVNVVVIPAGVPRKPGMTRDDLFNINAGIVKTLVEAVADNCPNAFIHIISNPVNSTVPIAAEVLKKKGVYDPKKLFGVTTLDVVRANTFVSQKKNLKLIDVDVPVIGGHAGITILPLLSKTKPSVSFTDEEIEKLTLRIQNAGTEVVDAKAGAGSATLSMAYAAARFVESSLRALDGDGDVYECSFVDSTLTDLPFFASRIKIGRNGVEAVIESDLQGLTEYEQKALEALKPELKASIEKGVAFANKPAN

SEQ ID NO: 70189 - DNA, 1459 bp, Brassica napus
  CDS (178)..(1239)
gaattcccgggtcgacttcgctgtcacgatttcgtgacgccacgcttcccaatacatataaccatttctgacgtcatcttctatctctaatcaatatataaacctgccgattcctcttcatcacattctcaaacttttaatcgaagcaaaataaaaaaaagaagaagaagcagagctatggatgcaaaccagcgtatcgctagaatctctgctcatctcaaccctcccaatctcgatcagattggttccgggtcgggtcttgaaggggtgggttgccgggcgaaaggcgggtctccaggattcaaagtggcgatactgggagcagcgggagggatagggcagcctctggcgatgttaatgaagatgaatccgttggtgtcgcttcttcatctctacgacgttgctaatgctcctggtgtcaccgctgatattagtcacatggacactagtgccatcgttcgtggatttctcggtcagtcgcaattagaggaagcacttacgggtatggatctagtgatcataccagctggtgttccgaggaagccagggatgaccagggatgatcttttcaaaatcaacgctggcatcgtgaggacactctctgaagctatagccaagtgctgtcccaaagcgattgtgaatatcatcagtaatcctgtgaactctaccgtgccaatcgcagctgaggttttcaagaaagctggcacttttgatccaaagaaactcatgggagtcaccatgcttgatgttgttagagctaatacttttgtggcggaagtaatgagtcttgatcctcgagaagttgatgttccagtcgttggaggacacgcaggagttacaatcttgcctctgctttctcaggtgaaacctccttgctctttcactcaaaatgagattgaatatctcacagaccgtatccaaaatggtggcactgaagttgtcgaggcaaaagctggtgcaggttctgcaacactatccatggcttacgcagcagtgaagtttgcagatgcttgcctcaagggtctacgtggcgatgcaaacatcgtcgagtgtgcatttgtggcatctcatgtgactgagcttcccttcttcgcatcaaaggtgcgtctaggaagatgtggggtcgatgaagtgtacggtctcggaccattgaatgaatacgagaggatgggactggagaaggcaaagaaagagcttgaagggagtattgcgaaaggtgttacctttgtgaagaagtaaagaccgttgacaaacacttagttttatctttcgaatagtgatttgtttggaataagaacaatgcctcgcaataaaagctcatgcgagtagtctgattttgaagattcaataaactgcagtcactctgttcttagatacaagaaggtttatgagtttatattcttatcttcttggtatgtttcttcaaatatgtgtttttcttacttaaaaaaaaaaaaaa

SEQ ID NO: 70190 - protein, 353 aa, Brassica napus
MDANQRIARISAHLNPPNLDQIGSGSGLEGVGCRAKGGSPGFKVAILGAAGGIGQPLAMLMKMNPLVSLLHLYDVANAPGVTADISHMDTSAIVRGFLGQSQLEEALTGMDLVIIPAGVPRKPGMTRDDLFKINAGIVRTLSEAIAKCCPKAIVNIISNPVNSTVPIAAEVFKKAGTFDPKKLMGVTMLDVVRANTFVAEVMSLDPREVDVPVVGGHAGVTILPLLSQVKPPCSFTQNEIEYLTDRIQNGGTEVVEAKAGAGSATLSMAYAAVKFADACLKGLRGDANIVECAFVASHVTELPFFASKVRLGRCGVDEVYGLGPLNEYERMGLEKAKKELEGSIAKGVTFVKK

SEQ ID NO: 70191 - DNA, 1297 bp, Glycine max
  CDS (56)..(1093)
cgttttttctcaaaaagttgcaagagttaaagcaaaaaccaaagtgagagagaaaatgatgaagccatcgatgctcagatctcttcactctgccgccacccgcggcgcctcccacctctcccgccgtggctacgcctccgagccggtgccggagcgcaaggtggccgttctaggtgccgccggcgggatcgggcaacccctctcccttctcatgaagctcaaccccctcgtttccagcctctccctctacgatatcgccggaactcccggtgtcgccgccgatgtcagccacatcaacaccggatctgaggtagtggggtaccaaggtgacgaagagctcggaaaagctttggagggtgcagatgttgttataattcctgctggtgtgcccagaaagcctggaatgactcgtgatgatctttttaacatcaatgctggcattgttaagacactgtgtactgctattgctaagtactgccctcatgcccttgttaacatgataagcaatcctgtgaactccactgttcctattgctgctgaagttttcaagaaggcaggaacgtatgatgagaagagattgtttggtgttaccacccttgatgttgttagggcaaaaactttctatgctgggaaagccaatgttccagttgctggtgttaatgtacctgttgtgggtggccatgcaggcattactattctgccattattttctcaagccacaccaaaagccaatcttgatgatgatgtcattaaggctcttacaaagaggacacaagatggaggaacagaagttgtagaagctaaggctggaaagggttctgcaactttgtcaatggcctatgctggtgccctatttgctgatgcttgccttaagggcctcaatggagtcccagatgttgtggagtgctcattcgtgcaatccactgttactgaacttccctactttgcttccaaggtgaggcttgggaagaatggagtggaggaagttctgggcttaggacctctctcagattttgagcaacaaggcctcgaaagccttaagcctgaactcaaatcatcaattgagaagggaatcaaatttgccaaccagtaattgaacatgttatcacatacgtgtctggtaggctaatgttaatgttattccttcaagaaccaaatcaaattttgcaatctcagaaccattgttgtattgttgccggcagtggtgtggcgactttgttgttttatttagagtaggtatacgccatgatttaataatttaagtctgagagctttttgttgcgaaaaaaaaaaaaaa

SEQ ID NO: 70192 - protein, 345 aa, Glycine max
MMKPSMLRSLHSAATRGASHLSRRGYASEPVPERKVAVLGAAGGIGQPLSLLMKLNPLVSSLSLYDIAGTPGVAADVSHINTGSEVVGYQGDEELGKALEGADVVIIPAGVPRKPGMTRDDLFNINAGIVKTLCTAIAKYCPHALVNMISNPVNSTVPIAAEVFKKAGTYDEKRLFGVTTLDVVRAKTFYAGKANVPVAGVNVPVVGGHAGITILPLFSQATPKANLDDDVIKALTKRTQDGGTEVVEAKAGKGSATLSMAYAGALFADACLKGLNGVPDVVECSFVQSTVTELPYFASKVRLGKNGVEEVLGLGPLSDFEQQGLESLKPELKSSIEKGIKFANQ

SEQ ID NO: 70193 - DNA, 1279 bp, Brassica napus
  CDS (43)..(1119)
aaaactgtttgccagcttcaaacaaagaaagagaacacaataatggagtttcgtggagatgccacccagagaattgctatgatatcagctcatcttcaaccttctttcacttctcagatggaggggaagaacactgtgatgggaagagaaaactgcagagggaaaggagggaaagcaggattcaaagtagcaatacttggagctgcaggtgggataggacaatcactatcgttgctaatgaagatgaaccctctcgtctctttacttcatctctacgatgttgtcaatgctcccggagtcactgctgacgtcagccatatggacactggagctgttgttagaggattcttgggagccaagcaacttgcggatgccctaacgggtatggatcttgtgatcataccagctggtgtgccgaggaaaccagggatgacacgcgatgatctcttcaaaatcaatgctgggattgttaagacgctatgtgagggagtagcgaaatgctgtcctaatgctatagtcaacttgattagtaaccctgtgaactccactgtggccattgccgctgaggttttcaagaaagctggaacttatgatcctaagaagctccttggagttactacactcgatgttgctcgtgccaacacatttgtggctgaagttcttggacttgatccaagagaagtcgatgtaccagtagttggaggacacgctggagttacaatattgccactattgtcacaggttaaaccacctagtagttttacaccttcagaaacagagtaccttacgaacaggattcaaaacggtgggactgaagtagtggaggcgaaagctggagctggatcagcaacactttcaatggcatatgctgcagccaagtttgcggatgcttgccttcgcgggttaagaggagatgcgaatgtcgttgagtgctcctttgttgcttcacaggtgaccgagttacctttctttgcaacgaaagtgcgtcttggacgtacaggagcagaggaagtgtttcagcttggacccttgaacgaatacgaaagggttggtctggagaaagcaaaagaggagttagcaggaagtattcagaaaggtgtcgacttcatcaggaaatgataactgagaataaatcatatgatcatgtactagtcactcatcatgcatgtgtccttgtgcttcttcttcttcaactttgtaaatttcctttcataagctgtgcaactcttgtggcctctctccttagacgttacatgtacttctataaaaaaaaaaaaaa

SEQ ID NO: 70194 - protein, 358 aa, Brassica napus
MEFRGDATQRIAMISAHLQPSFTSQMEGKNTVMGRENCRGKGGKAGFKVAILGAAGGIGQSLSLLMKMNPLVSLLHLYDVVNAPGVTADVSHMDTGAVVRGFLGAKQLADALTGMDLVIIPAGVPRKPGMTRDDLFKINAGIVKTLCEGVAKCCPNAIVNLISNPVNSTVAIAAEVFKKAGTYDPKKLLGVTTLDVARANTFVAEVLGLDPREVDVPVVGGHAGVTILPLLSQVKPPSSFTPSETEYLTNRIQNGGTEVVEAKAGAGSATLSMAYAAAKFADACLRGLRGDANVVECSFVASQVTELPFFATKVRLGRTGAEEVFQLGPLNEYERVGLEKAKEELAGSIQKGVDFIRK

SEQ ID NO: 70195 - DNA, 1744 bp, Triticum aestivum
  CDS (126)..(1310)
gaattcccgggtcgacgccgccaccgccgttccccttcttccccggcctccgggacatcctgctgctgcctccaccccgtcccagtctccggccactgggtctccttccttccttcgagttggacatggcatcatctgctaccatcagttcagttggcgctcaggctgctctggtttcaaagccaaggaatcatggcatcggtggcttaaaggcgtcctcatcaattaacttcgaattgggatcctcgttcctgggcaagaccgggtctcttcgggcatctgttaccacaagggttgtgcccaaggcgaagtctggggctcggatactaccggaggcatcttacaaagtggcggtacttggtgctgctgggggcatcggccaaccattgggcctgctgatcaagatgtctcctctggtctcggagctgcgactgtacgatattgcaaatgtcaagggagtcgctgctgatctcagccactgcaacacaccttctcaggtcatggacttcactggcccagcggaattagccagctgcttgaaaggtgtggatgttgttgtcatccccgccggggtccctagaaagcctgggatgactcgtgatgatcttttcaacatcaatgcgggcatcgtcaagtcacttatcgaggctgttgcagacaattgccctgatgcctttatccatattatcagcaacccagtcaactccacagtgccgattgctgctgagattctgaaacagaagggtgtctacaatcccaagaagctttttggggtttccaccctagatgttgtccgagctaacacattcgtagctcagaagaagggcctcaagctcattgatgttgatgtcccagttgttggtggtcatgctggaattacaatcctgcctttgttgtcaaagacgaggccatctgtcaccttcacggatgaggaaactgaacagctgacgaagaggatacagaacgctgggacagaggtggtggaggcgaaagcgggtgctggatctgctaccctgtccatggcttatgctgctgccagatttgttgagtcttcactccgtgcactggctggtgatccagatgtttatgagtgcacgtatgttcagtctgagttaactgagctgccattctttgcgtccagagttaagattggcaagaatggtgttgagtccatcatttctttggacctggagggaataactgagtacgaggccaatgcactcgaggcattgaagcctgagctgaaggccagcatcgagaagggcatcgagtttgcgcacaaacagcagggagccgccgcatctgtttgaagtgaggagaacggcgattccatacgaagagaaggcaaaatgattctccttgtcttctagttttgcagcctagagtattgacatgtagcagtatgccttggagcatctatatatttctcaattgttggtcagtttattacgattccagtttacatgagggcgtgaagccccaaacttgcaccctgttctggggccttgttttgtttgacacataaattttggtcctgttccacctgctgttcttgtagcttctggagttcaactgtggactaataaagaacatctttgatcattaccaaggcacgccatctagatctgcctctacttgtggtaacatattgtatggtgtcataagttatcaattgctgttgtaagatgagccagtgggatgaataataccttgtgcaagattttcgtacaaaaaaaaaaaaaaa

SEQ ID NO: 70196 - protein, 394 aa, Triticum aestivum
MASSATISSVGAQAALVSKPRNHGIGGLKASSSINFELGSSFLGKTGSLRASVTTRVVPKAKSGARILPEASYKVAVLGAAGGIGQPLGLLIKMSPLVSELRLYDIANVKGVAADLSHCNTPSQVMDFTGPAELASCLKGVDVVVIPAGVPRKPGMTRDDLFNINAGIVKSLIEAVADNCPDAFIHIISNPVNSTVPIAAEILKQKGVYNPKKLFGVSTLDVVRANTFVAQKKGLKLIDVDVPVVGGHAGITILPLLSKTRPSVTFTDEETEQLTKRIQNAGTEVVEAKAGAGSATLSMAYAAARFVESSLRALAGDPDVYECTYVQSELTELPFFASRVKIGKNGVESIISLDLEGITEYEANALEALKPELKASIEKGIEFAHKQQGAAASV

SEQ ID NO: 70197 - DNA, 1448 bp, Zea mays
  CDS (204)..(1388)
tttcgtatagcaccgaaggcgaggagggggggccaaggacgagcgccttttcgtgcccgctggccattgccgctgctcacgagcctcccgcctcttgctgccctgccctctgcggctctgccccaacgagccccaggagagccagccagccagttaaaggagccgtcaaaagcccccgccgaggagagcacgcaaggtcagacatggcgtcaaccgttaccttcagcccagttagcacccaagctgggttgatccataagccaaggaaccttggagccacaagctacgctggcttaaaggtgccgagctttggctctgagtcatcattcttgggtaggaacgcatcccttcgggcggctgttactacaaggattgtgcccaaggcaaagtctggatctcagatatcgccacaggcatcttacaaggtggcgctgctcggtgctgctggtggcatcggtcaacccttgggcctattgattaagatgtctcccctggtgtccgagctgcatctgtatgatattgctaatgtcaagggagtcgctgcagatctcagccactgcaacacgcccgctcaggtacttgacttcactgggccctcagagttagccagctgcttgaaaggcgtggatgttgttgtcatccctgccggggtcccaaggaagccgggcatgactcgtgatgacctttttaacatcaacgcgagcatcgtcaagtcacttgttgaggctgtcgcggacaattgccccgaggcgttcatccatatcatcagcaacccggtgaattccaccgtgccaatcgcagcagaggttttgaagcagaagggcgtctacaatcccaagaagctttttggggttaccaccctggatgttgtcagggctaacacatttgtggcgcagaagaagaaccttaatctcatcgatgttgatgtcccagttgttggtggccatgctgggatcacaattctgccgttgctatcaaagaccaggccgtccgtcaccttcacagatgaggaagctgaggagctgacaaagaggatacagaatgccgggacagaggtggtggaggcaaaggctggtgctgggtctgctaccctgtccatggcctacgctgctgccagattcgtcgagtcgtctctccgcgccctggccggcgaccccgatgtttacgagtgcacatttattcagtccgaggcaaccgatctgccattcttcgcatcaagagtcaagctcggcaagagtggtgtcgaatccatcgtttctgccgacctcgagggagtgaccgagtgcgaggccaaggcgcttgacgcgcttaaggccgagttgaagggaagcattgagaagggtgtcgccttcgccagcaaacagcaggaggctgctgcatctgtttgaagtgtccacaagagaataaagggacaatggtcttgaatggctttttaaaaaaaaaaaaaa

SEQ ID NO: 70198 - protein, 394 aa, Zea mays
MASTVTFSPVSTQAGLIHKPRNLGATSYAGLKVPSFGSESSFLGRNASLRAAVTTRIVPKAKSGSQISPQASYKVALLGAAGGIGQPLGLLIKMSPLVSELHLYDIANVKGVAADLSHCNTPAQVLDFTGPSELASCLKGVDVVVIPAGVPRKPGMTRDDLFNINASIVKSLVEAVADNCPEAFIHIISNPVNSTVPIAAEVLKQKGVYNPKKLFGVTTLDVVRANTFVAQKKNLNLIDVDVPVVGGHAGITILPLLSKTRPSVTFTDEEAEELTKRIQNAGTEVVEAKAGAGSATLSMAYAAARFVESSLRALAGDPDVYECTFIQSEATDLPFFASRVKLGKSGVESIVSADLEGVTECEAKALDALKAELKGSIEKGVAFASKQQEAAASV

SEQ ID NO: 70199 - DNA, 1358 bp, Glycine max
  CDS (68)..(1138)
cttcaacacactacttctcactctccctctctaatagtaatagtaatatacataagtaacataaccaatggaagcgcgtgcaggagccaatcagcgtattgcaagaatctctgctcatcttcagcctccaaatttccaggaagggagtgatgttcttcttaagagtgctgagtgcagagcaaagggtggggcacctggattcaaagttgcaattttgggggctgctgggggaattggtcaacccctttctttgctgatgaagatgaacccattggtttcagttcttcatctttatgatgttgtcaacacccctggtgtcactgctgatgttagccacatggacactggtgctgtggttcgtggctttctggggcagcaacaacttgagagtgcactcactggcatggacttggtaatcatacctgctggggtaccaaggaaacctgggatgacaagagatgatttatttaaaataaatgctggaattgtgaggaccctttgtgaaggaattgccaagagctgccccaatgcaattgtcaacttgattagtaatccagtgaattccacagttgctattgctgcagaggttttcaagaaagccggtacatatgatccaaagcgactactgggtgttacgacccttgatgttgtgagggcaaatacttttgtggcagaggtacttggagttgatccaagagaggttgatgttccagtggttggaggtcatgctggtgtcacaattttgcctcttttgtcacaggttaagcctcgcagtagcttcactgcagaagaaactgaatacctgacaaatcgcatccaaaatagtggaactgaagttgttgaggcaaaagctgggacaggttctgcaacactatcaatggcatatgcagctgccaagtttgctggtgcatgcctccgtggcttaaaaggagaagctggggtagtggagtgtgcttttgttgattctcaggttacggaacttcccttctttgcaaccaaggtacgtctaggtcgtgctggagcagaagaggtttatcaactgggtcccctgaatgagtatgaaaggattggattggaaaaggcaaagagagagttagcaggaagcatccagaagggtgtagagttcatcagaaaataaatgtgataaagaaaaactagtttttgtctcttatatataaggaccatgtgtaatgcttctctttgttcatagatttttttcttcttcttaagaatagtactctaaatttttggtgtcatccgtaattgctgatgataacggatttgacatcagtggaactgcttaataatctcagaaagatactaaaatatcagccttttgtactgaaaaaaaaaaaaaa

SEQ ID NO: 70200 - protein, 356 aa, Glycine max
MEARAGANQRIARISAHLQPPNFQEGSDVLLKSAECRAKGGAPGFKVAILGAAGGIGQPLSLLMKMNPLVSVLHLYDVVNTPGVTADVSHMDTGAVVRGFLGQQQLESALTGMDLVIIPAGVPRKPGMTRDDLFKINAGIVRTLCEGIAKSCPNAIVNLISNPVNSTVAIAAEVFKKAGTYDPKRLLGVTTLDVVRANTFVAEVLGVDPREVDVPVVGGHAGVTILPLLSQVKPRSSFTAEETEYLTNRIQNSGTEVVEAKAGTGSATLSMAYAAAKFAGACLRGLKGEAGVVECAFVDSQVTELPFFATKVRLGRAGAEEVYQLGPLNEYERIGLEKAKRELAGSIQKGVEFIRK

SEQ ID NO: 70201 - DNA, 1858 bp, Glycine max
  CDS (317)..(1546)
cagatctgtgtaaacgctattctcttccatttccatttctcaattgtctttctgtattccattatcgatgttgcaattttcattcaaaattacactctcattaactaattttagaacatgtatgcaagttgttttcagctctttctgtgttgtatgctatggcatcttaattggttcgattgaataatctgttaggtctaccctagcaaaacaaaccttatactttcttatttccttggtgctttttgtagctttcagataggtttctgtgtgttaatcgaatagacctgaattatttattgtatcacaggttgtgatggcagcagcaccagcagctaccttcgctattggaaccaccggttccctcggccaaagaggaagctcgcttcctcaatcaaagtcctttgggttgaaattcaactctctgaatcatttgaagagcttctgtggcctcaaggccatgtcatccgtgagatgtgagtcggaatcctccttcttcggtaacaaaaccggtgctgctctacgggcgtcttttgcatccaaagctcaaaaggaaaacaaccacaactcgcagcctcaggcttcgtacaaagttgcggttcttggtgctgctggagggataggtcagccgctctcgcttctcatcaagatgtcgcctttagtttccaacctgcatctctatgatattgcgaatgtcaagggagttgctgctgatatcagtcactgcaacacaccctcacaggtcagggatttcactggagcttctgagttgccgaattgtttgaaggatgtgaatgttgttgtcatacccgccggtgttccaaggaagcctggcatgactcgtgacgaccttttcaacatcaatgctggcattgtcagggacttggtttctgctgttgcggattactgccctgatgcttttgttcaaattatcagtaaccctgtgaactctaccgtgcctattgccgcagaagttttgaaacagaagggtgtgtatgatcctaagaagctctttggggttaccacactggatgttgtgcgggcaaacacgtttgttgctcagaggaagaacctgaagctgattgacgttgatgtcccagttgttggtggccatgccgggattaccattcttcctctgttgtcaaagacaagaccctcggcgagtttcactgatgaagaaattgatgagttgactgtcaggattcaaagcgctggaactgaagttgttgtagcaaaggcaggcacagggtctgctaccttgtcgatggcatatgctgctgctagatttgttgaatcgtctcttcgcgcacttgatggagatggggatgtgtatgagtgctcatttgtggaatcaaacttgactgaccttccattctttgcttcaagggtgaaacttggtaggacaggagttgaggctttaattccatctgacctccaagggttgactggctatgagcagaaggctttggaagcacttaagcctgaactcaaggccagcatagagaaggggattgcttttgctcagaagcaaactgttgctgcttaaatttccttgtcagcaggtggtttcttgggttatggatttatttgagcataaatactacttagaggacttaggttgcagatttgttgtagcatctttactgcttccagaacttaggattcagactttctatgtatcaattctacttccagttttgttagtagaacgggaggacgcttccatttctgttctctaaaccgagcttaggttttggtcagaaatcttcaaagatgtaagcattataatgtagaattgaaaaaaaatgtaaacgttgctttttgaataatatggccattagaccaaaaaaaaaaaaaa

SEQ ID NO: 70202 - protein, 409 aa, Glycine max
MAAAPAATFAIGTTGSLGQRGSSLPQSKSFGLKFNSLNHLKSFCGLKAMSSVRCESESSFFGNKTGAALRASFASKAQKENNHNSQPQASYKVAVLGAAGGIGQPLSLLIKMSPLVSNLHLYDIANVKGVAADISHCNTPSQVRDFTGASELPNCLKDVNVVVIPAGVPRKPGMTRDDLFNINAGIVRDLVSAVADYCPDAFVQIISNPVNSTVPIAAEVLKQKGVYDPKKLFGVTTLDVVRANTFVAQRKNLKLIDVDVPVVGGHAGITILPLLSKTRPSASFTDEEIDELTVRIQSAGTEVVVAKAGTGSATLSMAYAAARFVESSLRALDGDGDVYECSFVESNLTDLPFFASRVKLGRTGVEALIPSDLQGLTGYEQKALEALKPELKASIEKGIAFAQKQTVAA

SEQ ID NO: 70203 - DNA, 1545 bp, Triticum aestivum
  CDS (160)..(1236)
cgaacggacggaaagacaacttttgcatccggcccctccgctttaccccttttctcccgccctcgcaaccacctccgctgtcctccccggagtctcttcttctcttccctctcccgtcgcctcccgagtctccggcgaccacgcggaaccgacgcggccatggagcaaggcgccgactccgcggcggccaggcggatggccagggtcgcctcccacctccgcccgcccacctcgcaggaggaggaggtggccatcttgaagggctctaattgccgtgcaaaaggtgcagcaccagggttcaaggttgcagtcctgggtgcatctggtgggatcggccagcccctctcgctgcttatgaagatgaaccctcttgtttcggtgctccatttgtatgatgttgtcaacacacctggtgttacagctgacattagccatatgaacaccggtgctgtggtgcgtggcttcttgggtcagccacaattggaaagtgctcttactggaatggatcttgtcatcattcctgctggcattcctcggaaacctgggatgacaagggatgatttgttcaacatcaatgctggaattgttcggactctttgcgggggaattgcaaaatgctgcccaaatgcgattgtgaatgtgatcagtaaccctgtaaattccactgttccgattgctgctgaagtatttaaaaaagctggaacatatgatcctaagcgcctattgggggtgacaacacttgatgtagtgagagccaatacctttgtgggagaggttcttggacttgaccccagagatgtcaatgttcctgttgttggtgggcatgcaggagttacaatattaccactcctttcacaggtgaatcctccctgttcgtttacctcagaagaaattagttatctcacttcccgcatacagaatggtgggacagaagtagttgaggcgaaagcaggagcgggatccgcgactctttccatggcctacgcagcagccaggttcgcggacgcgtgcctgagagggctgcgcggcgacgccgggatagtggagtgctcctacatagcctctcaggtgacggagctggccttcttcgcgtccaaggtgcggctgggccgggccggcgtcgaggaggtcctgccgctcggcccgctgaacgagtttgagagggccgggctggagaaggccaagggcgagctcgccgagagcatccgcaagggcgtcgccttcgccaacaagtgagatgaaagatgggaagaaaatacagcacacagctcctccgtatctttcgccggatggaatgctccgaggcccagcatagaaatctgagacgcattttgcttcctgcctgtcagcaacggtccgcctgggagcaacggtcgccgtgtgatgtgacgtaaatctccctgtcatataacagtaataataatgatgataaattgtactgtatttataccggtatatacgatgcggacaacccgatgtttacggctgtactgtattatacactcgatgaataaaatacgacattagagtaaaaaaaaaaaaaaa

SEQ ID NO: 70204 - protein, 358 aa, Triticum aestivum
MEQGADSAAARRMARVASHLRPPTSQEEEVAILKGSNCRAKGAAPGFKVAVLGASGGIGQPLSLLMKMNPLVSVLHLYDVVNTPGVTADISHMNTGAVVRGFLGQPQLESALTGMDLVIIPAGIPRKPGMTRDDLFNINAGIVRTLCGGIAKCCPNAIVNVISNPVNSTVPIAAEVFKKAGTYDPKRLLGVTTLDVVRANTFVGEVLGLDPRDVNVPVVGGHAGVTILPLLSQVNPPCSFTSEEISYLTSRIQNGGTEVVEAKAGAGSATLSMAYAAARFADACLRGLRGDAGIVECSYIASQVTELAFFASKVRLGRAGVEEVLPLGPLNEFERAGLEKAKGELAESIRKGVAFANK

SEQ ID NO: 70205 - DNA, 1335 bp, Hordeum vulgare
  CDS (38)..(1114)
cgagtctccggcgaccacacacgccaccgcgacggccatggagcaaggcgccgactcaccggcggcgaggcggatggcgagggtcgcgtcccacctccgcccgcccacctcgcagatggaggaggtggccatcttgaagggctctaattgccgtgcgaaaggtgcggcgccagggttcaaggtcgctgtcctgggtgcatctggtgggattggccagccactctcgctgcttatgaagatgaaccctcttgtttcggtgctccatttatacgatgttgtcaacacacctggtgtcacagctgacattagccacatgaacactggtgctgtggtgcgtggctttttgggtcagccacaattggagagtgctcttactggaatggatcttgtgatcattcctgctggcattcctcggaaacctgggatgacaagggatgatttgttcaacatcaatgctgggatcgttcggactctttgcgagggaattgcaaaatgctgcccaaatgcgattgtgaacgtgatcagtaaccctgtaaattccacagttccgattgctgctgaagtatttaaaaaagctggaacatatgatcctaagcgcctattgggggtgacaactcttgatgtagtgagagccaatacctttgtgggagaggttcttggacttgatcccagagatgtcaatgttcctgttgttggcgggcatgcaggagttacgatattaccactcctttcacaggtgaatcctccctgttcgtttacctcagaagaaattagttatctcacttctcgcatacagaatggtgggacagaagtagttgaggcgaaagcgggggcaggatccgcaactctttccatggcctacgcagcagccaaattcgcggacgcctgcctgagagggctgcgcggcgacgccgggatagtcgagtgctcgtacatagcctctcaggtgacggagctgcccttcttcgcgtccaaggtgcggctgggccgggccggcgtcgaggaggtcctgccgctcggcccgctcaacgagtttgagagggccgggctggagaaggcccagggcgagctggccgagagcatccgcaagggcgtcgcgttcgccaacaagtgatgaagagaaggatctaaaaaaaaaaaagtgatgaagagaagtgtattcagctgcgtattcttggcccccccagcatagaaatctgagatgccttttgcttccgtctgctcctgcctgggagcaacggtcgccgtgtgatgtgatatccctgtatatcgtataataacaataacaataataatgaagtgtactgtattttatactgcaaaaaaaaaaaaaaa

SEQ ID NO: 70206 - protein, 358 aa, Hordeum vulgare
MEQGADSPAARRMARVASHLRPPTSQMEEVAILKGSNCRAKGAAPGFKVAVLGASGGIGQPLSLLMKMNPLVSVLHLYDVVNTPGVTADISHMNTGAVVRGFLGQPQLESALTGMDLVIIPAGIPRKPGMTRDDLFNINAGIVRTLCEGIAKCCPNAIVNVISNPVNSTVPIAAEVFKKAGTYDPKRLLGVTTLDVVRANTFVGEVLGLDPRDVNVPVVGGHAGVTILPLLSQVNPPCSFTSEEISYLTSRIQNGGTEVVEAKAGAGSATLSMAYAAAKFADACLRGLRGDAGIVECSYIASQVTELPFFASKVRLGRAGVEEVLPLGPLNEFERAGLEKAQGELAESIRKGVAFANK

SEQ ID NO: 70207 - DNA, 2229 bp, Triticum aestivum
  CDS (347)..(1876)
gccatgcccaacctcctcccaccattgccatgcccacccgcccgcacactttcccatttcagtcgcggctccgtggcagggccgtgcttcaaatgccggtctccgctcgcttcattattcgcctgagcatgcagtaattcctccgggtcggcaccgggttcctgaaatttcgctccacttctagaattatattggcccgacgccgcctcaaggttggatttttagagtcaaacatcggaatcttggccgacacggactgggtttctttgagcaaaatcgcttgcctgctacccacccgctgagctagagattggattcgcgggggcgtttcggtggggggccgagcatgacgatcgatttgtccaccatgcccgggagctcctcctcccgtctcctggacgccgccgcggcgaggaaggacatgaacttcttcaaaaaccgctacgtgcttgggctcaccggcgtcgccggaatcggcgggttcctctttggatacgacacaggtgttatatctggagcgcttctgtatattcgggacgaatttccagctgtcaaagacaatctattcttgcaggagacaattgttagcatggcattacttggagccatgcttggagcagctgggggcggttggataaatgatgcctacggtcgtaaaaagtccactcttcttgctgacctgatgttcgcacttggttcactggttatgtgtgctgctggcggtccttacattctgatacttggaaggctctttgttggattgggtgtgggaatagcatcagtcactgccccagtttacatcgctgaagctgctccttcagaaatcaggggaggtttggtgtcaactaatgtcctcatgattactggcggccaattcttctcctacttggtcaatcttggctttaccgaggttcctgggacatggcgctggatgctcggagtagctgctgtgccagcaatcatacagtttgtgctgatgctttttctgccagaatctccccgctggctttaccggaaggatgagaaagcaaaagctattgctgtcctggagcagatatatgactctggtcgtctggaggaagaggttgagctgcttgcgtcggcttccatgcatgaattccagtctaactgtactgggagctatttggacatattcaggttgaaggaattaaggctagctttttttgctggagctggtcttcaggcctttcagcaatttactggcatcaacaccgtcatgtactacagccccacgatcgtccagatggctgggttcacttccaacaggctggccctgctactttccctcatcgttgccgccatgaatgcgagtggaaccatcgtcggaatctacctcatcgaccgttgtggccgccgccgcctggcccttacaagcctagccggggtcgtgctctcccttgtcatcctcgccacggccttcatactgcagtcatcctccagcctctgcgggagcctgttcagcggctcctgccaaggcgtgctggggtggttcgcggtcggagggctcgctctgtacatcgccttcttctctccgggcatggggccggtgccatgggccgtgaactcggagatctaccccgaggcctaccgcggcatgtgcggcggcatgtcggccaccgtcaactggatctccaacctgatcgtggcgcagacgttcctctcgatcgtggggtgggtcggcaccggcccaacattcataatcatcgccgggatagccgtgatggccttgatcttcgtcgccctctacgtgccggagaccaagggcctgagcttcgaggaggtggacctcctgtggaaagagcgggcctggggaagccagggcagccacgagagcctcctgggtgctgcgccgtaagaggtaagaccaccacctgctggctctggtcctgcacggcggtgcatcggcggcgcccttttagtatggttctgcggctgcgccccgccgcgcctggctggctcgcggcggtcgctggcttctagctaggacgggagtcttagaaagaactggatggacaatatcatacacgaatcacgaacctgtatatcaatggcggtgtgttatgttgtcgtcgcgtgttcaagtcgaatattgttgagtcaaagcgaccgtatgactgagacgcagcaatattgtttctgcattgccggcatgagtgcaccaagaaccaaagagcaagagctccgttggcggtgaaaaaaaaaaaaaaa

SEQ ID NO: 70208 - protein, 509 aa, Triticum aestivum
MTIDLSTMPGSSSSRLLDAAAARKDMNFFKNRYVLGLTGVAGIGGFLFGYDTGVISGALLYIRDEFPAVKDNLFLQETIVSMALLGAMLGAAGGGWINDAYGRKKSTLLADLMFALGSLVMCAAGGPYILILGRLFVGLGVGIASVTAPVYIAEAAPSEIRGGLVSTNVLMITGGQFFSYLVNLGFTEVPGTWRWMLGVAAVPAIIQFVLMLFLPESPRWLYRKDEKAKAIAVLEQIYDSGRLEEEVELLASASMHEFQSNCTGSYLDIFRLKELRLAFFAGAGLQAFQQFTGINTVMYYSPTIVQMAGFTSNRLALLLSLIVAAMNASGTIVGIYLIDRCGRRRLALTSLAGVVLSLVILATAFILQSSSSLCGSLFSGSCQGVLGWFAVGGLALYIAFFSPGMGPVPWAVNSEIYPEAYRGMCGGMSATVNWISNLIVAQTFLSIVGWVGTGPTFIIIAGIAVMALIFVALYVPETKGLSFEEVDLLWKERAWGSQGSHESLLGAAP

SEQ ID NO: 70209 - DNA, 1748 bp, Brassica napus
  CDS (95)..(1729)
atcatctcaatctctccgcggagtctcccaagtttctctggtagcttcctactcgaagttcgctttggtttataaaagctaagattaaaaaaaaatgcaatcgtcaacgtacgcagctgttaaaggaaacgctgcgtttgcgtttcagagacgtagcttctctaacctcgtcagcagatcggcgactactaccggaattcgcttctccaccggctcttacttcgcacaactccactcttccgcctcgaaagccatgggagcgaagcttgctcgcgctgagaacgggattcacagtctctcctcggtcaaagctcgatcggttagagcacaagcctcctctggtggtggtgacgaagaagaagcaatacctctgagatctgaaggaaaaatctcagggacggttttacccttcgttggtgttgcttgtcttggtgctatcttgtttggttatcatctcggggttgttaacggtgctcttgagtaccttgctaaggatcttggtatcgctgataatgctgttttgcaagggtggattgttagcgcgttgcttgctggtgcaacggtcggttctttcaccggaggtgcattagctgacaaatttggaagaactagaacttttcaattggatgctatcccgcttgctattggagctttcttatgtgcaacagctcagagtgtgcagactatgattgtgggacgtctgctcgcaggggttggaatcggaatctcatcagccattgtaccactttacatctccgagatatcaccaactgaaattcgcggtgcactcggatctgtgaaccagttgttcatatgtattggaatactcgcagccttgatagctggattaccccttgcagcaaaccctctatggtggaggacgatgtttggtgttgcagttatcccttccgttctattagccataggaatggggttttctccagaaagcccaaggtggctcgttcagcaaggaaaacttactcaagcggaaaaggctatcaaaactctgtatggtaaagaaaaagtggttgaactagtgcgtgacttatcaaactctggccaaggtacttctgagccagaggcaggatggtttgatctattcagcagccgctactggaaagttgtaagcgttggtgcggcgctcttcttgtttcagcagttagctgggataaatgcagttgtgtactactctacatctgtgttccgcagcgccggaatccaatctgatgttgcagccagtgctcttgttggagcatcaaacgtgtttggaactgctgttgcttcgtctttgatggacaaaatgggaaggaaaagtcttctacttactagctttggtggaatggcgttgtctatgctgttgctctcgttgtccttcacatggaaggctcttgctgcatattctggcactcttgctgttgttggaactgttctatatgtcctgtcattttcgcttggtgctggcccagtaccggctcttttgcttccagagatattcgcatccaggatcagagcaaaagccgtcgctctttctctcggcatgcactggatctcaaactttgtgattggactctacttcttgagcgttgtgactaaattcggaatcagcagtgtctacttgggattcgcaggagtgtgtgtccttgcagtcatgtacattgcaggaaacgtggtggagactaaaggacggtcactcgaggaaatagagcttgctcttacatccggagcttaaaaccaaaaaaaaaaaaaaa

SEQ ID NO: 70210 - protein, 544 aa, Brassica napus
MQSSTYAAVKGNAAFAFQRRSFSNLVSRSATTTGIRFSTGSYFAQLHSSASKAMGAKLARAENGIHSLSSVKARSVRAQASSGGGDEEEAIPLRSEGKISGTVLPFVGVACLGAILFGYHLGVVNGALEYLAKDLGIADNAVLQGWIVSALLAGATVGSFTGGALADKFGRTRTFQLDAIPLAIGAFLCATAQSVQTMIVGRLLAGVGIGISSAIVPLYISEISPTEIRGALGSVNQLFICIGILAALIAGLPLAANPLWWRTMFGVAVIPSVLLAIGMGFSPESPRWLVQQGKLTQAEKAIKTLYGKEKVVELVRDLSNSGQGTSEPEAGWFDLFSSRYWKVVSVGAALFLFQQLAGINAVVYYSTSVFRSAGIQSDVAASALVGASNVFGTAVASSLMDKMGRKSLLLTSFGGMALSMLLLSLSFTWKALAAYSGTLAVVGTVLYVLSFSLGAGPVPALLLPEIFASRIRAKAVALSLGMHWISNFVIGLYFLSVVTKFGISSVYLGFAGVCVLAVMYIAGNVVETKGRSLEEIELALTSGA

SEQ ID NO: 70211 - DNA, 1949 bp, Glycine max
  CDS (141)..(1799)
gggagcatcacttttcaacatttacaaacagataactctcttttaatacttgataatctgatcctgctccatactacgatgattccacgcacatttaatacttgatattcatacactgtttctttgttccgctgcctcgcatggcatcaactactctcttcagcttcagactctctttgaacccactgcaccatcaacagacaacgaggccaaaatctctgctctcctctcctcgcaccaatccacgcctcgtttcttccattaacaatcatttggccctcacacgtgtcacatacccgcttctccaatctcactctgctcctaagcgcagattccatgtgtattctgatggggaaagctccgagtcgcttgtttctgacgctacataccaagaggaattttcttggtcttctgtaattcttccgtttctgttccctgcgttgggtggcttattatttggctatgatattggagccacctctggcgctacaatttcactgcagtcacctgagcttagcggtatatcatggtttaaactttctgctattcagcttggactagtggttagtggttccctatatggggctcttcttggctcgcttgttgcatttgccatagctgatttccttgggaggaagaaacaactcattactgcagcactgttgtatttgtttggtggtgtgattactgcctatgcaccagaacttggtgttctcttagcaggaaggctgctttatggacttggtataggtttggccatgcatggggctcctttatatattgcggagacttgtccatcacaaatccgtgggactttagtatcattaaaagaactcttcattgtcctggggattctgctgggttattttgtgggaagctttctgattgagaccgttgggggatggcggttcatgtatggatttagtgctccagttgctgtattaatggggcttggaatgttgactctccccaattctccacggtggttgcttctcagagcagtgcaaggaaaaggttcttttcaagatttgaaggaaaaggccattttttccctgagcaaattaaggggccgaccacctggtgacaaagaatccgagagacaagtagaagaaacccttgtctcattgaagtctgcctatgcagataaggaatcggaggggaatttcttagaggtgtttcagggtccgaatctgaaagctttcataattggtgggggactagtcttatttcaacagataacaggtcaaccaagtgttctgtactatgcaggtccaattcttcagagtgctggattttctgctgcatccgatgctacaaaagtttcggttgttattggcctattcaagttgctaatgacttggattgctgtcctaaaagttgatgatttggggagaagacctctgctgattggaggtgtcagtggcattgccctttctctagttctcctttctgcttattataaatttcttggaggtttcccacttgttgctgttggagctttacttctttatgttggttgctaccagatatcatttgggccgataagttggctaatggtatcagaggtcttcccacttcgcactagaggaaaggggattagtctggctgttcttaccaacttcgcttcaaatgctgttgtcacctttgcattctccccgctaaaggagtttctaggagcagaaaatctttttctcctttttggggctattgctattctatcacttttgttcattatcttttctgtcccagagacaaaaggcttgagtttagaagatatagaatccaaaatcttgaagtgacaacttaatccagcaccttttgatgtgaatgctgtatattttggttgagtctgtcaccttgtgtatatatctcctgtgtggaatttgattgtcatggttacgtttgcagtataaacattggaatttttaatctctaaaaaaaaaaaaaaa

SEQ ID NO: 70212 - protein, 552 aa, Glycine max
MASTTLFSFRLSLNPLHHQQTTRPKSLLSSPRTNPRLVSSINNHLALTRVTYPLLQSHSAPKRRFHVYSDGESSESLVSDATYQEEFSWSSVILPFLFPALGGLLFGYDIGATSGATISLQSPELSGISWFKLSAIQLGLVVSGSLYGALLGSLVAFAIADFLGRKKQLITAALLYLFGGVITAYAPELGVLLAGRLLYGLGIGLAMHGAPLYIAETCPSQIRGTLVSLKELFIVLGILLGYFVGSFLIETVGGWRFMYGFSAPVAVLMGLGMLTLPNSPRWLLLRAVQGKGSFQDLKEKAIFSLSKLRGRPPGDKESERQVEETLVSLKSAYADKESEGNFLEVFQGPNLKAFIIGGGLVLFQQITGQPSVLYYAGPILQSAGFSAASDATKVSVVIGLFKLLMTWIAVLKVDDLGRRPLLIGGVSGIALSLVLLSAYYKFLGGFPLVAVGALLLYVGCYQISFGPISWLMVSEVFPLRTRGKGISLAVLTNFASNAVVTFAFSPLKEFLGAENLFLLFGAIAILSLLFIIFSVPETKGLSLEDIESKILK

SEQ ID NO: 70213 - DNA, 2143 bp, Glycine max
  CDS (268)..(1719)
gcgttcctttcttccttccttctttttcccccctacaaacaaaaacaaagcaacattcccttttctatctgtttccttcgcgaaccagcaacaacccccggcgcacgatagcgccatcgctttcgttacgcggttggtaaccgtctctctttcatcaccgtttttatttccattcacaaaaccaacaacctctctgtgatttttcttcacttttctctctcggaacaaaacggaggatccgtcatagtattggtcaaatattggctaatgtgggtgggacattcatctatgtacaagcgcactccttcgagagataattcaaacatggaggacatggaagaaaactcagacatcggcctggacaagggaacatcaaatccttcattgatgctttctttaccgcatgtacttgtggcgaccatttcttcattcctttttggataccatctgggggttgttaatgaaccacttgagagcatttctgtggatcttggcttccgtggaaatacattggcagaaggtctggtggtgagcatatgccttggtggtgccttgattggatgtctactaagtggttggattgctgatggggtggggcgtcgtagggctttccagttgtgtgctctgccaatgataattggtgcttctatgagtgcagcaacaaacaacttgtttggcatgcttgtaggaaggttgtttgttgggactggcttgggcctgggccctcctgttgcctctctgtatgtgacagaggtttctcctgcttttgtgcggggcacctttggagctttcatccagattgcaacatgccttggtctaatgggagctttatttattggaatccctgtcaaagaaatttctggatggtggcgggtttgtttttgggtatctaccattccagctgctatacttgccgcagctatggtcttctgcgcagagagtccgcattggttatacaagcaaggaagaactgctgaagcagaagctgagtttgagagacttctgggtgtatcagaagcaaaatttgcaatgtcggagttatccaaggtagatagaagtgatgatactgatactgtaaagctgtcggaattgcttcatggtcgtcattctaaagttgtttttattggatcaaccctatttgctttacaacagctatctggtataaatgctgggttttatttctcttcaactgtttttaaaagtgctggagtcccatcagacattgcaaatgtctgcataggaatcgctaatttggcaggatctatcgtttcaatgggtttgatggataagcttggaaggaaggttctacttttctggagtttctttggcatggcaatagcaatgatccttcaagccacaggagcaacttcacttgtatcaaacgtgggagctcagtacttttctgttggtggcatgttactgtttgtcttaacatttgctctgggggctggtccagttccaggtctccttctaccagaaatctttcctagtcgaataagagccaaagccatggcagtctgtatgtcagtgcattgggtgataaatttctttgttggactactgttcttgcgtttgctggagaaacttggtccacagctgctttactccatgtttgctaccttttgcatcatggcagtaacttttgtaaaaagaaatgtggtggaaaccaaagggaagtcacttcatgaaattgagatcgcacttcttcctcaagactagatctctattcatttgattgctctaattttgcatagtttttcggctgagcagattgtgtttcgtctattttggttgaccttaacattacaaggggaagctcaggaactatgcattgttttgctgcaacattagtacgaagaggcttaggtattatggctagctgtgatgtagtaggtggtactattagcggcttacaacacgagaccctttctgttgttactcgcggcttgtgattctatgatttggcatccacgtaaagggagacataattcatcaggggggatctatgcatcccataatattccataaatgtactactttatgtaatattatatatgtttctgtacgtgacattatttttaatcgcttcaattttgtcccattttggatacgaagtagtctagcatgtaaaaaaaaaaaaaaa

SEQ ID NO: 70214 - protein, 483 aa, Glycine max
MWVGHSSMYKRTPSRDNSNMEDMEENSDIGLDKGTSNPSLMLSLPHVLVATISSFLFGYHLGVVNEPLESISVDLGFRGNTLAEGLVVSICLGGALIGCLLSGWIADGVGRRRAFQLCALPMIIGASMSAATNNLFGMLVGRLFVGTGLGLGPPVASLYVTEVSPAFVRGTFGAFIQIATCLGLMGALFIGIPVKEISGWWRVCFWVSTIPAAILAAAMVFCAESPHWLYKQGRTAEAEAEFERLLGVSEAKFAMSELSKVDRSDDTDTVKLSELLHGRHSKVVFIGSTLFALQQLSGINAGFYFSSTVFKSAGVPSDIANVCIGIANLAGSIVSMGLMDKLGRKVLLFWSFFGMAIAMILQATGATSLVSNVGAQYFSVGGMLLFVLTFALGAGPVPGLLLPEIFPSRIRAKAMAVCMSVHWVINFFVGLLFLRLLEKLGPQLLYSMFATFCIMAVTFVKRNVVETKGKSLHEIEIALLPQD

SEQ ID NO: 70215 - DNA, 2655 bp, Triticum aestivum
  CDS (102)..(2336)
ggggcctgccgcttcttgggcttctccatctcatctccttggttggttctctactagagaggcgcagctgcagggatccttggtggagaggagggaagaagatgtcgggtgctgcactggtcgcgattgcggcttccattggcaatctgctgcaggggtgggacaatgccaccatcgctggtgctgttctgtacatcaagaaggaattccagctcgaaaataatccgactgtggaggggctcatcgtggccatgtcgctcatcggtgcaaccatcatcaccacattctccgggccagtatcagactgggttggccggcgccctatgctcattctctcttcgcttctctacttcctcagcggcttaatcatgctatggtcacccaatgtctatgtgctgctcctggcacgccttgtcgatggctttggtatcggcttggctgtcacactggtgcctttgtacatctcagagacggctccttcggagatcaggggaaggctcaacacgcttccacagttcagtgggtcaggagggatgttcttgtcatactgcatggtgttcgggatgtcactcttgccatcacctgattggagaattatgctcggggttctctcagttccgtcgttgtttttcttcgtcttgacggtattttacctgccagaatctccgagatggcttgtcagcaagggccgaatggcagaggcaaagaaggtgctgcaaagattacggggaagggaggatgtctcaggagaaatggcccttcttgttgaaggtttggaggttggaggagacacctccattgaggagtacataataggaccagctaatgacccagctgatgatcatgttgttgatggcgataatgaccaaataacactatatgggcctgaagagggccaatcatggattgctcgaccttccaagggacccagcatgcttggaagtgtgctttctcttgcatctcgtcatggtagcatggtgaaccagagtgtgccccttatggatcctctagtcacgcttttcggaagtgttcatgagaacatgcctcaagttggaggaagcatgcggagcacattgtttcctaactttggcagcatgctcagtgtggcagatcagcacccaaaaactgagcactgggatgaggagaacgttcatagggacgatgaagaatatgcatctgatgctggaggcgactacgaagataatgtccatagcccgctgctgtcacgacagaccacaaacacggatgggaaggaccatggtcaccatggaagcactttgggcatgagaaggagaagtctcttggaagagggtggggaggcagtcagcagcactggtattggtggggggtggcaactcacatggaaatggtcggagcgacaaggcgaggatggcaagaaggaaggaggcttcaaaagaatctacttgcaccaagagggggtggccgactcaagaaggggctctgttgtttcacttcctggtgggggtgatgccacgcaagggggcagtgggtttatacacgcagctgctttggtaagccactcggctctttactccaaggatcttatggaagagcgtatggcggctggtccagccatgattcatccattggaggcagctcccaaaggttcaatctggaaagatctgtttgaacctggtgtgaggcgtgcattgttcgtcggcgttggaattcagatgcttcagcagtttgctggaataaatggagttctctactatactcctcaaattctggagcaagctggtgtggcggttcttctttccaatcttggcctcagttcagcatcagcatccatcttgatcagttctctcaccaccttactcatgctcccaagcattggtgtagccatgagacttatggatatatctggaagaaggtttctgctactaggcacaattcccatcttgatagcatccctaattgttttggttgtgtccaatgttatcaacttgagtacggtgccccacgctgtgctctccacagttagcgtcattgtctacttctgctgctttgtcatgggctttggcccgatccccaacattctatgtgcagagattttccccaccagagcccgtggtgtctgcatcgctatttgcgccctcacattctggatttgtgacattattgttacctacagcctgcctgtgatgctgaatgctattggtctagcaggtgtctttggtatatatgcagtcgtttgctgcatcgcctttgtgttcgtctacctaaaggtcccagagacaaagggcatgcccctcgaggtcatcaccgagttctttgcggttggggcgaagcaagcgcagaccaccattgcctgattcatcatggagctttgttttcagtttgcacactgcgctgaaaattgcaaattggacgggtcctcgtgaggaacggaaaaacttttgagttgtaaatgagatagctacccaaagagttcatcacgaggaacggaagctgtaaaagtaggaggatttcatgcccccatttcatcgtctattcttgcttattagtactgtactgtaatcgtcattagttgctgtagggatgttcaacttgctaatctgattctgaactactatgctgatgtccgaaataaagaaaaagcatgttttttttaaaaaaaaaaaaagcggccgc

SEQ ID NO: 70216 - protein, 744 aa, Triticum aestivum
MSGAALVAIAASIGNLLQGWDNATIAGAVLYIKKEFQLENNPTVEGLIVAMSLIGATIITTFSGPVSDWVGRRPMLILSSLLYFLSGLIMLWSPNVYVLLLARLVDGFGIGLAVTLVPLYISETAPSEIRGRLNTLPQFSGSGGMFLSYCMVFGMSLLPSPDWRIMLGVLSVPSLFFFVLTVFYLPESPRWLVSKGRMAEAKKVLQRLRGREDVSGEMALLVEGLEVGGDTSIEEYIIGPANDPADDHVVDGDNDQITLYGPEEGQSWIARPSKGPSMLGSVLSLASRHGSMVNQSVPLMDPLVTLFGSVHENMPQVGGSMRSTLFPNFGSMLSVADQHPKTEHWDEENVHRDDEEYASDAGGDYEDNVHSPLLSRQTTNTDGKDHGHHGSTLGMRRRSLLEEGGEAVSSTGIGGGWQLTWKWSERQGEDGKKEGGFKRIYLHQEGVADSRRGSVVSLPGGGDATQGGSGFIHAAALVSHSALYSKDLMEERMAAGPAMIHPLEAAPKGSIWKDLFEPGVRRALFVGVGIQMLQQFAGINGVLYYTPQILEQAGVAVLLSNLGLSSASASILISSLTTLLMLPSIGVAMRLMDISGRRFLLLGTIPILIASLIVLVVSNVINLSTVPHAVLSTVSVIVYFCCFVMGFGPIPNILCAEIFPTRARGVCIAICALTFWICDIIVTYSLPVMLNAIGLAGVFGIYAVVCCIAFVFVYLKVPETKGMPLEVITEFFAVGAKQAQTTIA

SEQ ID NO: 70217 - DNA, 1374 bp, Glycine max
  CDS (118)..(1200)
actttcactcgaagaaccttgaagcgagtctgggccacagcaaccagcgacaacaactcaatcagctagggttgctttgcttgctatcttgttggaggattttctgttcaagagaagatggtaactagaattgtggatcttcgttcagacacagttacaaagccaactgaagcaatgagagctgctatggcaagtgctgaagttgatgacgatgttctaggctatgatccaactgcttttcgcttagaaacagagatggcaaagacaatgggcaaagaagctgctctttttgttccatctggcactatggggaaccttgtatctgtacttgttcattgtgatgtcaggggaagtgaggttattcttggagacaattgccatatcaacatttttgagaatggaggcattgcaaccattgggggagtgcatccaagacaagtgaaaaataacgatgatggaaccatagacattgatttgattgaggctgctataagggacccaatgggggagctattctatccaaccaccaagcttatttgcttggaaaacactcatgcaaactctggtggcagatgcctctcagttgaatatacagacagagttggagagttagctaagaagcatggactgaagcttcacattgatggggcccgtatttttaacgcatcagttgcacttggtgttccagtggataggcttgtccaggcggctgattcagtttccgtttgcctatctaaaggtataggtgctccagttggatctgttattgttggttccaagaattttattgccaaggctagacgactccggaaaaccttaggaggtggaatgagacagattggcctcctttgtgccgctgcacttgttgccttgcaggaaaatgttgggaagctggaaagtgatcacaagaaagctagacttttggctgatggattaaaagaagttaaaggactgagagtggatgctggttctgtggagaccaatatggtatttattgacattgaagagggtacaaagactagggcagaaaagatatgcaagtacatggaagaacgtggtatccttgtgatgcaagagagttcatcaagaatgagagttgttctccaccaccaaatatcagcaagtgatgtgcaatatgcattgtcgtgctttcagcaagctctagctgtcaagggagtacaaaatgaaatgggcaactagtggaagaatttgaatatggcacgttgctgccatattagtcattaaaaaggaattccgtgttccatttgcctttgctcatttgattttcttaaatgtaccctaaagaacatgcaaagatttacatctttgatgttgttccctgttatgaattatgttgactaaaaaaaaaaaaaa

SEQ ID NO: 70218 - protein, 360 aa, Glycine max
MVTRIVDLRSDTVTKPTEAMRAAMASAEVDDDVLGYDPTAFRLETEMAKTMGKEAALFVPSGTMGNLVSVLVHCDVRGSEVILGDNCHINIFENGGIATIGGVHPRQVKNNDDGTIDIDLIEAAIRDPMGELFYPTTKLICLENTHANSGGRCLSVEYTDRVGELAKKHGLKLHIDGARIFNASVALGVPVDRLVQAADSVSVCLSKGIGAPVGSVIVGSKNFIAKARRLRKTLGGGMRQIGLLCAAALVALQENVGKLESDHKKARLLADGLKEVKGLRVDAGSVETNMVFIDIEEGTKTRAEKICKYMEERGILVMQESSSRMRVVLHHQISASDVQYALSCFQQALAVKGVQNEMGN

SEQ ID NO: 70219 - DNA, 1848 bp, Zea mays
  CDS (384)..(1637)
cccaccgccgcccctccctcgagttcccccgaacgccgcccctcaggttcccgggacgccgcccctcagttttcctggacgccgaccctccctcgaggttctccgtgtagatccgccacctctcccttgcacgaactcgcgcccctccgtcgaggtcccctggacgccgcgcccacccctagcgcctatcttgccaaacaccatcaaaactccagaggagttgccccaccagggagttttggagcagagcagctctaggtggagcagagctatgccaaacacgcttgtcccaaacaggacctgagacgaaccctttggcctcggctctcgtcttgtgagtgtgtaatctcggatcgggaaactcgactgcggggtcggagaagatggcggcggcgggagaagttgccggcgcttcgtcggggacgaggacgaagcggcttaagattgccgtcatccacccggatctcggaatcggtggtgctgagagattgattgtcgatgcggcttgtcagcttgctgcccacgatcatgatgttcatgtcttcacatcacatcatgataaaaaacgttgctttgaggagactctttctggtttgtttccggttactgtacatggggatttcctgcctcgccatgtgttctaccgctttcatgctgtttgtgcttatcttcgctgcatttttgttgcgctctgtgtgctactcagatggcccttctttgatgtcatattggtagaccaggtttctgttgtgattccactacttaaactaatggcatcatcgaagataatattttactgtcatttccctgatctgttacttgcacaacatactactatgcttcggaggttatatcgcaagccaattgacatgattgaggaaagcactactggtatggctgatttgattcttgtcaatagcaagttcactgcagcaacttttgcaaggaccttttctggtttacatgctagaggaatcgagcctggtgttctttatccagctgtctctgttgagcagtttcacgaaccccatgcttataagttgaatttcctatcaatcaaccggtttgagaggaaaaagaatcttgatcttgccatttcagcatttgctttgctccgttctgctgcttggactctacctggtgatgctctacaagaagcaacattaacagtggcaggtggctatgataagcgtctcaaggaaaatgttgaataccttgaggaactcaaaagactcgcattgacggaaggggtttctggacaggttaattttgttacatcttgctcaacatctgaaagaaacgagcttctctccaactgcctctgcgttttatacactccaaaggatgaacatttcggtattgtacctcttgaagccatggccgcccataagccggtaattgcctgcaatagtggtggcccagtggaaacagttgtgaatgaagtaacagggtttctgtgtgatccctctcccgcagaattctccaaagccatgctgaaacttgtgaatgatcatgatcttgctgtcagattgggtgaacaagcacgtgaccatgtggtgcaaaaattctcgaccaagacatttggtgatctcctcaacagctacgtcttgaacatctaccatgagaggatggaatgatctataatattgggtcagccatgccatatgaaaacaatttgttcaatacaaggttttttttgcacctttacgtctaatctgattttgatggacacacataatgacaatgacattccattgaatccctttggcatactgtagtcactctatgatctgtatattgttttcaattataacatcaaatttggcttggtccaaaaaaaaaaaaaaa

SEQ ID NO: 70220 - protein, 417 aa, Zea mays
MAAAGEVAGASSGTRTKRLKIAVIHPDLGIGGAERLIVDAACQLAAHDHDVHVFTSHHDKKRCFEETLSGLFPVTVHGDFLPRHVFYRFHAVCAYLRCIFVALCVLLRWPFFDVILVDQVSVVIPLLKLMASSKIIFYCHFPDLLLAQHTTMLRRLYRKPIDMIEESTTGMADLILVNSKFTAATFARTFSGLHARGIEPGVLYPAVSVEQFHEPHAYKLNFLSINRFERKKNLDLAISAFALLRSAAWTLPGDALQEATLTVAGGYDKRLKENVEYLEELKRLALTEGVSGQVNFVTSCSTSERNELLSNCLCVLYTPKDEHFGIVPLEAMAAHKPVIACNSGGPVETVVNEVTGFLCDPSPAEFSKAMLKLVNDHDLAVRLGEQARDHVVQKFSTKTFGDLLNSYVLNIYHERME

SEQ ID NO: 70221 - DNA, 1411 bp, Helianthus annuus
  CDS (58)..(1266)
ccaactcaactcaacaagcgtaaagtgtaaatcccctttcttctgtgtgcaagagcaatggagaagaaaaacgggtcgaagaagatgaacatcgccatcattcatcctgatctcggaatcggaggagccgaaaggttaatagttgatgcggcagttgaactagcatctcatggtcataatgttcacattttcacatctcaccatgatagaaatcgctgttttgaggagacacttgcaggttcatttgcagttacagtatacggatctttccttccaagacacatcttttaccgttttcatgcggtttgtgcatacatacgttgcatattcgttgctctatgtgtgttgttcaagtggccatcttttgatgttgtgcttgctgatcaagtctcagtcgtcattccaatattaaagcttaaaaattcttctaaggttgtattctattgtcatttccctgatttgttacttgcaaagcacacgactattgttaggagaatatatcgggcgcccataaactatttggaacaattaacaacagggatggtagatttaattctagttaacagcaaatttacagcatccacttttgctgcaacatttaagcgtcttgattctcaagggataaaaccagctgtgctgtaccctgcagtaaatgtggatcagttcagtcaaccgaatggttataggttgaattttctttcaatcaatcgttttgaaaagaaaaagaatattgacttggcaatatcagcatttgcaatgcttgggtctcctgacgtgacattgacgattgcaggtggatttgatcagcgattgagagaaaatgttgattacttggagcaattaaaagtcttggcagaaattaaaggtgtgtctaagcaagtcaaattcatcacatcttgtccaacttccgaaagaaacgctcttctgtctgagtgcttatgcgttatatatacaccaaaggatgaacattttggtatagttccacttgaggcaatggcggcccacaaacccgtgatagcatgcaatagtggtggcccggtggagagcgtgaaagatggagagacagggttcctgtgtgacccgtcaccacaaagcttctcattggccatggccaagttcttgaaggacccctcgttggcagaaaatatgggctcgaaagcccgagcccatgttgctacatcattctctaccaaaacttttggcatccagttgaatcaatatatcatggatgtagtggaacaacacaaacatacaaaagcagattaaagaaagataatgttaggaggtattgatcttccagttgacctttttcgtcccgttgtggcataactttaggagcttcttgacccatttgatttgtatgtttccatacatttgttcataagattactgttggaaaaaaaaaaaaaaa

SEQ ID NO: 70222 - protein, 402 aa, Helianthus annuus
MEKKNGSKKMNIAIIHPDLGIGGAERLIVDAAVELASHGHNVHIFTSHHDRNRCFEETLAGSFAVTVYGSFLPRHIFYRFHAVCAYIRCIFVALCVLFKWPSFDVVLADQVSVVIPILKLKNSSKVVFYCHFPDLLLAKHTTIVRRIYRAPINYLEQLTTGMVDLILVNSKFTASTFAATFKRLDSQGIKPAVLYPAVNVDQFSQPNGYRLNFLSINRFEKKKNIDLAISAFAMLGSPDVTLTIAGGFDQRLRENVDYLEQLKVLAEIKGVSKQVKFITSCPTSERNALLSECLCVIYTPKDEHFGIVPLEAMAAHKPVIACNSGGPVESVKDGETGFLCDPSPQSFSLAMAKFLKDPSLAENMGSKARAHVATSFSTKTFGIQLNQYIMDVVEQHKHTKAD

SEQ ID NO: 70223 - DNA, 1727 bp, Zea mays
  CDS (125)..(1573)
gaattcccgggtcgacttcgctgtcgacgatttcgtaggtggccggacggtggtggcatcgccaattcaactccgcatctgaatcggcactcggcagcgcgccagctccatagtgtaggaggagatggcgctcacaagaatcggtcttgctggccttgcggtcatggggcagaaccttgccctcaacattgcagagaaagggttccccatctctgtgtacaacaggacaacctccaaggtggacgagaccgtgcagcgtgccaaggcagaaggaaaccttcccgtctacggcttccatgaccccgcgtcctttgtgaagtccattcagaagccacgggtggtgatcatgctcgtcaaggccggcgcgccagttgaccagaccatcgcgacgctcgcagctcacttggagcagggcgactgcatcatcgatggggggaacgagtggtacgagaacacggagaggagggagaaggccatggaggagcgcggcctcctgtatcttggcatgggtgtctctggaggagaggagggtgcccgcaacggcccgtccttgatgcccggaggctcgttcgaggcttacaagtacgtcgaagacattgtcctcaaggtggctgctcaggtccctgacagtggcccgtgtgtcacgtacattggcaaaggtggatcgggcaactttgtcaagatggttcacaacggaatcgagtatggcgatatgcagctgatttccgaggcatacgacgttctcaagtcggtcggtaagctcaccaacagtgagctgcaccaggtgttctccgagtggaacaagggcgagctcctgagcttcttgatcgagatcacggccgacatctttggcatcaaggacgagcatggcgatggctacctggtggacaaggtccttgacaagaccgggatgaaagggacagggaagtggacggtgcagcaggccgccgagctgtcggtggccgctcctacgatcgaggcgtccttggactcgaggttcctgagcgggctgaaggacgagcgggtggaggcctccaagatcttccagggtgactactactccaccggctcgccggtggacaaggcgcagctggtggaggacgtgaggcaggccctgtacgcgtccaagatctgcagctacgcgcagggcatgaacatcatcaaggccaagagcgcggagaaaggctgggggctcaacctcggcgagctggccaggatctggaagggcgggtgcatcatccgcgccatcttcctggaccgcatcaagaaggcctacgacaggaacccgggcctcgccagcctgctcgtagaccccgagttcgcgcaggagatcatggacaggcaggcggcgtggcgcagggtggtgtgcctcgccatcaacaacggcgtcagcaccccgggaatgtccgctagcctggcctacttcgactcctaccgcagggacaggctgcctaccaacctggtgcaggcccagagggactacttcggggctcacacctacgagagggtcgacatgcctggctctttccacaccgagtggttcaagattgcgcgcaacatctccaacaactgatgagctgctcaacggatggcatgcccggtgttgactactccagtcggtaatgagatttcctgcaggaacttgtctattgatctttgtaagttaattatttatatgaataaaataagagcagacatgcttgtgtttgggcaaaaaaaaaaaaaaa

SEQ ID NO: 70224 - protein, 482 aa, Zea mays
MALTRIGLAGLAVMGQNLALNIAEKGFPISVYNRTTSKVDETVQRAKAEGNLPVYGFHDPASFVKSIQKPRVVIMLVKAGAPVDQTIATLAAHLEQGDCIIDGGNEWYENTERREKAMEERGLLYLGMGVSGGEEGARNGPSLMPGGSFEAYKYVEDIVLKVAAQVPDSGPCVTYIGKGGSGNFVKMVHNGIEYGDMQLISEAYDVLKSVGKLTNSELHQVFSEWNKGELLSFLIEITADIFGIKDEHGDGYLVDKVLDKTGMKGTGKWTVQQAAELSVAAPTIEASLDSRFLSGLKDERVEASKIFQGDYYSTGSPVDKAQLVEDVRQALYASKICSYAQGMNIIKAKSAEKGWGLNLGELARIWKGGCIIRAIFLDRIKKAYDRNPGLASLLVDPEFAQEIMDRQAAWRRVVCLAINNGVSTPGMSASLAYFDSYRRDRLPTNLVQAQRDYFGAHTYERVDMPGSFHTEWFKIARNISNN

SEQ ID NO: 70225 - DNA, 1924 bp, Glycine max
  CDS (216)..(1676)
gaattcccgggtcgactttcaattttctactgcgaacaataataataataataataataatttttcgttattgataatctttctcaccttttattgttatcattattatataatatatatatagcttctaccctcgctcgcatcttttcatccgtgctctgtgattccagaccttaatttttctctcattcgcttcaaatttcaggaaatcaattatggctcaaccctcaacaagaataggccttgctggactggctgttatgggccaaaatctagcactcaatattgctgagaaaggctttcccatttctgtttataaccgaaccacttccaaggttgatgagactgtagaacgagcaaaacaggaaggaaatcttccagtttatggctaccatgaccccgaagcttttgttcattccattcaaaagcctagggtgataataatgcttgttaaggctggggcacctgttgaccagaccattaagaccctatctgcatacatggaaaaaggtgactgcataattgatggtggtaacgaatggtacgagaacaccgaaagaagagagaaatcggtggctgaattgggtctgctctaccttgggatgggagtttctggtggtgaggaaggtgctcgtaatggtccctctttgatgcctggtggttcgtttgaggctttcaaatacatagaagatattcttctcaaggtggcagctcaagtccctgacagtggtccttgcgtgacttatattggtaaaggtggctctggtaattttgtgaaaatgatccacaatggcatcgaatatggtgacatgcagctgattgcagaggcctatgatgtgctgaagtcagttggaaagttgtcaaatgaggaactacaaagtgtcttctcagaatggaacaagggagaacttctgagtttcctgattgaaatcactgcagatatatttggaattaaggatgataagggagatggatatcttgttgacaaggtcctagacaagactggcatgaagggcactggtaagtggactgttcagcaagctgctgaattatcaattgctgctcccactattgaagcatcattggatgcaaggttcctgagtggtttgaaggaggaaagagttgaagctgcaaaggtctttaaatcaggtggcattggtgatatcgtgactgatcaacctgtagacaagaaaaaattggttgatgatgttaggaaggctctttatgcagccaaaatctgtagttatgcacagggaatgaatttgatccgtgcaaagagtattgaaaagggttgggatttgaagttgggtgaactggcccggatttggaaaggtggttgcatcattagagcaatattcttagacagaatcaagcaagcgtatgatagaaaccctaatctggcaaaccttcttgtggatccagagtttgcaaaggaaataatcgatcgccaatctgcctggaggagagttgtttgccttgctatcaattctggtatcagcactccaggtatgtctgctagtcttgcttattttgacacttacagaagggaaaggttgccagctaatttggtgcaagctcaacgagactactttggtgctcatacatatgaaagggttgacatagaggggtcttaccatactgagtggttcaagcttgccaaacagtctagaatttagattactgtatttgaaccaatcaggattttcctaataaatgtaatgttttctgctcagactgtatgctgagttgagtttacatagccacaacgtggtgaagttttatttatattatttccaactgaattgcttgatagtttgttttccaactatgttgtatctttgctgatcatgctttgtgcttgatacaaaattgtcccagctcatggtgcctttttaattttcacattttgaaaaaaaaaaaaaaa

SEQ ID NO: 70226 - protein, 486 aa, Glycine max
MAQPSTRIGLAGLAVMGQNLALNIAEKGFPISVYNRTTSKVDETVERAKQEGNLPVYGYHDPEAFVHSIQKPRVIIMLVKAGAPVDQTIKTLSAYMEKGDCIIDGGNEWYENTERREKSVAELGLLYLGMGVSGGEEGARNGPSLMPGGSFEAFKYIEDILLKVAAQVPDSGPCVTYIGKGGSGNFVKMIHNGIEYGDMQLIAEAYDVLKSVGKLSNEELQSVFSEWNKGELLSFLIEITADIFGIKDDKGDGYLVDKVLDKTGMKGTGKWTVQQAAELSIAAPTIEASLDARFLSGLKEERVEAAKVFKSGGIGDIVTDQPVDKKKLVDDVRKALYAAKICSYAQGMNLIRAKSIEKGWDLKLGELARIWKGGCIIRAIFLDRIKQAYDRNPNLANLLVDPEFAKEIIDRQSAWRRVVCLAINSGISTPGMSASLAYFDTYRRERLPANLVQAQRDYFGAHTYERVDIEGSYHTEWFKLAKQSRI

SEQ ID NO: 70227 - DNA, 1791 bp, Linum usitatissimum
  CDS (67)..(1524)
cgcgttcatccttccatctccgcacaacttctaattgtcatctcggtcgattcacaaggaaaagccatggctgcgaaaccaagaatcggacttgctggtttggctgttatgggtcagaacctcgctctcaacatcgcagagaaaggattccccatttccgtctacaatcggtctacctccaaggttgatgagactgtcgagagagcaaagagagagggtgatctcccagttcttggattccatgatcctgaatctttcgtccagtcgatccagaagcctcgtgtgataatcatgctagttaaggccggggctcccgtcgatgccaccatccagactctttctgcctacatggagaaaggtgactgcattatcgacggtgggaacgagtggtatgaaaacactgagaggaggcaaaaggcgatgctagagaagggtttactatatctcggaatgggagtttcgggtggcgaggaaggtgcacgaaacggtccctcgatgatgcctggaggatccctggaggtgtacaagtacattgaagacattcttctgaaagtggcagctcaagttcccgacagtggcccgtgtgtaacatacatcggagaaggtggatccggtaactttgttaagatggtccacaatggaatcgaatacggtgatatgcagctgattgccgaagcttatgatgtgctgaagtcggtgggaaagctttccaacgaggagttgcataacgtttttacggaatggaacaagggcgagctactgagcttcctaattgaaataactgctgatatttttggaattaaagatgataagggagagggatatttggttgataaggtcctggacaaaaccggtatgaagggtactggtaaatggacggtgcagcaagctgcagatctttctgtggcagctcccacaattgctgcttcgttggatgccaggtttcttagtggtctgaaggaggaaagggttcaagctgccgaggtgttcaagtctggtggtttctcggatattctcactgaccaagttgtggacaaggagacgttgattgatgatgtgaggaaagcactttatgcatccaagatttgcagttatgcacagggaatgaacctgattcgcgccaagagtatcgagaaaggatggggattggtgttgggagagttggctaggatttggaaaggaggctgcattatcagagcagtgttcctggacaggatcaagcaggcctatgaccgtaaccctgaactgtctaaccttctcgtggatcccgagtttgcaaaggaaatcatcgagcgccagtctgcatggcgcagggttgtgtctcttgcggtcaactccggtattagtactcccggtatgtcgtccagccttgcctatttcgacacctacaggagaggaaggttgcctgctaatcttgtgcaagctcaaagggattactttggtgctcatacttatgaaagaactgatatggaaggagctttccataccgagtggttcaagattgctcggcaatcaaagtactagacaatctcctggtttctttctaagcataataactcgggttcgagggatctgcgcccgaacttgagacctgcattgtggagcagattttatctttatggattgtagtttggcaggggttctaactgcttgcgtttgtactgttttttttacaatttctccttactatttggatgagatatttcattttccgtatggtatttgctcaaagtttgatgttggactgagttattcaaccatattgcttctctttcgaaaaaaaaaaaaaaa

SEQ ID NO: 70228 - protein, 485 aa, Linum usitatissimum
MAAKPRIGLAGLAVMGQNLALNIAEKGFPISVYNRSTSKVDETVERAKREGDLPVLGFHDPESFVQSIQKPRVIIMLVKAGAPVDATIQTLSAYMEKGDCIIDGGNEWYENTERRQKAMLEKGLLYLGMGVSGGEEGARNGPSMMPGGSLEVYKYIEDILLKVAAQVPDSGPCVTYIGEGGSGNFVKMVHNGIEYGDMQLIAEAYDVLKSVGKLSNEELHNVFTEWNKGELLSFLIEITADIFGIKDDKGEGYLVDKVLDKTGMKGTGKWTVQQAADLSVAAPTIAASLDARFLSGLKEERVQAAEVFKSGGFSDILTDQVVDKETLIDDVRKALYASKICSYAQGMNLIRAKSIEKGWGLVLGELARIWKGGCIIRAVFLDRIKQAYDRNPELSNLLVDPEFAKEIIERQSAWRRVVSLAVNSGISTPGMSSSLAYFDTYRRGRLPANLVQAQRDYFGAHTYERTDMEGAFHTEWFKIARQSKY

SEQ ID NO: 70229 - DNA, 1726 bp, Helianthus annuus
  CDS (63)..(1538)
ctgttttgccaatcggaattttccagatcttttcatcttcattgtttctcataagaatagacatggctgatcaatcgaagctaacaagagttgggcttgccggtcttgctgttatgggccaaaacctggccctgaacattgctgaaaaagggttcccaatctctgtctacaatcgcagtacatccaaagttgacgaaaccgttgagcgagctaaaaaggaaggcgatctcccagtttttggcttccatgatcccgaatctttcgttaactcaattcaaaaaccccgggtgattatcatgctcgtcaaagccggtgcacccgttgaccaaacaatcaaaactttatctcaatacatggagaaaggtgattgcatcattgatggtggtaatgagtggtatgaaaacaccgaaagaagagaaaaggccatggctgaattaggccttttgtatctcgggatgggtgtttctggtggtgaagaaggtgcgagaaacgggccatccatgatgcccggtgggtctattgaggcttacaagtacattgaggacattgttctcaaagtagccgctcaagtacccgacagtggcccatgtgtgacatatatcggtgaaggtggttcaggcaacttcgtcaagatggttcataacggaatcgagtacggtgacatgcaactaatttcagaagcttatgatgtattaaaatccgttggaaagctttccaatgaggaactacatgaagtcttctcagaatggaacaaaggagagcttcaaagctttttaatcgagatcaccgctgacattttcggcatcaaggatgataagggagatggttatctggttgacaaagtgttggataaaaccggcatgaaaggtaccggtaaatggaccgtccaacaagccgccgatctgtcaattgccgctcccacaatcgcagcatctttagactcacgttttcttagtggtttaaaagacgaacgtgtagaagctgcaaaggtattcaaatcaggcgggtttgacgatattctcgcagatcaacaggtggataaagaaaagttgatcaatgacgtaaggcaagctctatacgcagcgaaaatatgcagttacgcacaagggatgaacctgatacgcgccaagagcaatgaaaagggatggaacctgaaactcggtgagttggctagaatctggaaaggtgggtgcatcattcgagccatattcttggaccgtatcaagcaggcttatgacaggaaccctgaactggctaaccttttggtggaccccgagtttgctaaggaaatggtcgagcgtcaatctgcttggagaagagttgtgtgtttggctattaattcaggtattagcactccgggtatgtcttctagccttgcttatttcgatacttataggagggagaggctgcctgctaatttggttcaagctcaaagagattactttggtgctcatacttatgaaaggaccgatatgcccggttctttccacaccgaatggttcaaactcgccaaacaggcaaacaatagccgtctttaggtgatgtctgtcttgtccttttgagatcgaaagtataataaatgtcatatttgagatttgtattcttgtctaatatgttggatgagggtttttggtaatttgttttgttgttttgtgttcgagcagacgttacttcatttcgaattataataattttatcttgttactaaatcaaaaaaaaaaaaaaa

SEQ ID NO: 70230 - protein, 491 aa, Helianthus annuus
MADQSKLTRVGLAGLAVMGQNLALNIAEKGFPISVYNRSTSKVDETVERAKKEGDLPVFGFHDPESFVNSIQKPRVIIMLVKAGAPVDQTIKTLSQYMEKGDCIIDGGNEWYENTERREKAMAELGLLYLGMGVSGGEEGARNGPSMMPGGSIEAYKYIEDIVLKVAAQVPDSGPCVTYIGEGGSGNFVKMVHNGIEYGDMQLISEAYDVLKSVGKLSNEELHEVFSEWNKGELQSFLIEITADIFGIKDDKGDGYLVDKVLDKTGMKGTGKWTVQQAADLSIAAPTIAASLDSRFLSGLKDERVEAAKVFKSGGFDDILADQQVDKEKLINDVRQALYAAKICSYAQGMNLIRAKSNEKGWNLKLGELARIWKGGCIIRAIFLDRIKQAYDRNPELANLLVDPEFAKEMVERQSAWRRVVCLAINSGISTPGMSSSLAYFDTYRRERLPANLVQAQRDYFGAHTYERTDMPGSFHTEWFKLAKQANNSRL

SEQ ID NO: 70231 - DNA, 1127 bp, Glycine max
  CDS (199)..(879)
gtcgacgtttcgtaaaacgtgtcgttttgttcgttcagttctgttaccctaattgaggcacatgtttggcttgttcttgaacttgtggaggctgcaattgacttcttgttgcaattgatggcaagtactgaatgataattgttgctgaagagagttaaataaagaccaggaatttcactgccagaaacgttcaatattatggagattgaagccgacgcaagagatagttctcttgttctgctcaagcaaggagctgaagctagggtttttgagtcttcttttgtgggaaggaaatccgttgtcaaggaacgcttctcaaagaagtacaggcatccaactttggattcaaaattgaccctcaagcgcttaaatgcggaggcaaggtgcatgaccaaagcaaggcgacttggggtttgtactcctgtgctgtatgctgtggatcctgctttgcacacgttaacatttgaatatgttgagggcccttctgtcaaagatgtgtttcttgaattcaggtcacatgttgtcaataaagagtggctggatgatattgcatcccaaattggtgatgcaattggaaagctacatgatggtggtcttattcatggtgatttaacaacatcaaatatgttactgaagagtgatacaaagcagttggttcttatcgattttggtttgagcttcacttcaactctaccagaagataaggctgttgatttgtatgttctggaaagagctcttatttcaatgcattcgtcatgtgggaatgtgatggatcagatacttgctgcatacaggaagtcatcaaagcagtggtcatccacattgaacaaacttgcacaagtgcgacaaagaggacggaagaggaccatggttggatgaatctttatcaaatttcatttcattattgagatataaaagagatggcaactatggatgttatgtaatttatttttacattgtctctctattgcatatttgtagtctgcttttctaactgtttataaaaatgcaatgacttttgaactttttgttgacatttattcctactgagtgtgcaactaacaaatcaaaattgtttgaaagtattctcactgcttatgttgatatgtccgaaaaaaaaaaaaaaa

SEQ ID NO: 70232 - protein, 226 aa, Glycine max
MEIEADARDSSLVLLKQGAEARVFESSFVGRKSVVKERFSKKYRHPTLDSKLTLKRLNAEARCMTKARRLGVCTPVLYAVDPALHTLTFEYVEGPSVKDVFLEFRSHVVNKEWLDDIASQIGDAIGKLHDGGLIHGDLTTSNMLLKSDTKQLVLIDFGLSFTSTLPEDKAVDLYVLERALISMHSSCGNVMDQILAAYRKSSKQWSSTLNKLAQVRQRGRKRTMVG

SEQ ID NO: 70233 - DNA, 1936 bp, Hordeum vulgare
  CDS (65)..(1642)
ggtacgttcgtacggtgaagcaggcggaatccaccttcttctagaatcaacccgcccgcccgccatggcgagcttcgcgagggaggagcaccagttcctcgccgagctcggcctcgcgccgcgcaacccgggctccttcgcctgcggcgcctggggcggctcgggccccgtcgtcgccaccaccaaccccaccaacaacgaggtcattgccgaggtcgtcgaagcgtccgtggacgactacgagaagggcatgagcgcctgcttcgatgccgccaggacctggatggctgtcccggctccgaaacgaggagaaattgttaggcagattggtgatgccctgagagcaaagcttcatcacctcggcagacttctgtcacttgagatggggaaaattctccctgaaggaattggggaggttcaggaaattattgacatgtgtgattatgctgtggggctaagtcgtcagctaaatggatccatcataccatctgaacgcccaaaccatatgatgatggaggtctggaatcctcttggagttgttggtgtcatcacagcattcaatttcccttgcgccgtgctgggttggaatgcttgcattgctttggtctgcggcaactgtgttgtctggaagggtgctccaactactccattgatcactattgcaatgactaaaatagtggctagtgtatttgagaagaacaacttgccaagtgcaatcttcacagctttttgtgggggtgctgaaattggtcaagcaattgctcttgacacaaggatacctttggtttcattcacaggaagtacaaaggttggtcaaatggttcagcaacaggttagcgcgagatttggtaaatgccttcttgaacttagtgggaacaatgccattattgtcatggatgatgcagacattccactagctgtgcgttctgttttgtttgctgctgttggcacagcagggcaacgatgcactacatgtcgtaggctgcttcttcatgaaagcatatatcaaacatttcttgatcaacttgttgaggtttataaacaagtccgtattggggatcctatggaaaagggcaccttgctgggaccactgcacactactgcatcaaaagaaagctttttgaaaggcatccaaactatcagatcccagggaggaaaaatccttctaggaggatcttctattgaatcagaagggaactttgttcaaccaacaattgtggaaatttcacctgatgcgccagttgtgagggaagaattgtttggtcctgtcctttatgccatgaaatttcagaccctgaaggaagcaattgaaatcaacaattctgttcctcaaggattgagcagttctatatttacaaggaagccagatgctattttcaagtggattgggcctcatggtagtgattgtggtatagtgaatgtaaatatacccactaatggtgctgaaattggtggagcttttggtggagaaaaagcaaccggtggcggacgagaagcaggaagtgattcctggaagcaatacatgaggagggctacttgtacaatcaactacggaagcgagctgcctctagcacagggaataaattttggctagtttggtgctgaaggattgccagtgaatcgtgctgcaacttggggataaggtgttgagatatctgcagcgtgcagccatcatcttcaggaaattctctgtgtcgatcattgcacccaaattgcgacgtgctgctgagtacatataataagagatatgttgatctcatgtatgcattgttcatgccttttggcatgtttagccatctgtgccctagtgtattactaataaactggaaaaatagcttctcttccggtgagagcaacattgtccgcattttaccctgagatcggaccggtcgaaataaaaggagatcgtagccttcaggttaaaaaaaaaaaaaaa

SEQ ID NO: 70234 - protein, 524 aa, Hordeum vulgare
MASFAREEHQFLAELGLAPRNPGSFACGAWGGSGPVVATTNPTNNEVIAEVVEASVDDYEKGMSACFDAARTWMAVPAPKRGEIVRQIGDALRAKLHHLGRLLSLEMGKILPEGIGEVQEIIDMCDYAVGLSRQLNGSIIPSERPNHMMMEVWNPLGVVGVITAFNFPCAVLGWNACIALVCGNCVVWKGAPTTPLITIAMTKIVASVFEKNNLPSAIFTAFCGGAEIGQAIALDTRIPLVSFTGSTKVGQMVQQQVSARFGKCLLELSGNNAIIVMDDADIPLAVRSVLFAAVGTAGQRCTTCRRLLLHESIYQTFLDQLVEVYKQVRIGDPMEKGTLLGPLHTTASKESFLKGIQTIRSQGGKILLGGSSIESEGNFVQPTIVEISPDAPVVREELFGPVLYAMKFQTLKEAIEINNSVPQGLSSSIFTRKPDAIFKWIGPHGSDCGIVNVNIPTNGAEIGGAFGGEKATGGGREAGSDSWKQYMRRATCTINYGSELPLAQGINFGFGAEGLPVNRAATWG

SEQ ID NO: 70235 - DNA, 1902 bp, Glycine max
  CDS (86)..(1699)
ggcacatacactatagctgattcacttcatccagcgcaagtaaacaaaaaccactgcaatttttctattaggacgaccaccgcaaatggcagcattgaacctttgccgcatggcacttcgatcctcgaagcttctctctcgcccttatcatcgtctttctgttcagttgcagatgcagatgcagccctcttctcctccactcactcgaaagatgagcatggatgcacagagtgttgcttctcagcttaatagttctggattgttgaggactcagggccttattggagggaaatggagtgatgcttatgatggcaaaaccataaaggtttataatccagcaactggtgaatctattgtagatgttgcatgcatgggtggaagagagacaaatgatgcaatttctgcagcctatgatgcatatggatcatggagcaaaaccactgccgctgaacgaagcaaatttctgaggaaatggtatgatttgctaatggtacataaagaagaacttgcacagcttataaccttggagcaggggaaacctcttaaagagtctgttggtgagataaactatggggctggctttattgagtttgcagctgaggaggcaaaacgtatatatggggatataattcctgcacctctatctgatcggcgattatttgttctaaagcagcctgtaggggttgtaggtgcaattacaccttggaactttccccttgctatgattactcgaaaggttggtccagcccttgcatgtggctgtacagtggtcataaagccctctgaacttacgcctctcaccgctttagctgcagcggaactctccattcaagctggaataccaccgggtgtcgtgaatgtggtaatgggaaatgctcctgatattggggacgctttacttgcaagtccacaggtaaggaagatcacattcacaggctcgacggctgttgggaagaaattgatggctggttcagctgaaacagttaaaaaagtatctcttgaactcggcggcaatgcaccttgcatagtttttgatgatgctgacctggatgttgcagtaaaaggaactcttgcagcaaagttccgtaacagtggacaaacatgtgtttgtgcaaatagaattattgtgcaagaaggtatatatgagaagtttgcaaatgctttacgtgatactgttcagaatatgaaagttggggatggtttcagtgaaggtgtggcacagggtcctctaatcaatgaagctgctgtcaaaaaggttgagtccttaattcatgatgctacatcaaagggggcaaaagtaattcttgggggtaaaagacatagccttggatttactttttatgaacccacggtcatcagtgatgtcaacagtgatatgcgcatatcaagagaggaagcatttggacctgttgcaccccttttgagattcaaaactgaagaggatgctatcagaattgctaacgacactaatgcaggtttgggttcatacatatttacaaacagtatccaacgatcatggcgtgttgctgaggctctagaatatggacttgtgggtgttaatgaaggagtaatttcaactgaggtggctccattcggtggttttaaacagtccggcctcggaagagaaggctccaaatatgggatggatgaatatttagagatcaagtatgtttgcttgggaaacatgcacaaagcttgaacaaaggtatacatgaggcagtggctagctagagggaaaagtacttaccttcagtgagtttgttgaagaatatgcatatagctgcacacgtgttgtatacaaataagggcaggcttgcaaaggacctcctcatttttctgtttttctttttcttttcattttcattgctttctttttatggtcttttagaaaaaaaaaaaaaa

SEQ ID NO: 70236 - protein, 537 aa, Glycine max
MAALNLCRMALRSSKLLSRPYHRLSVQLQMQMQPSSPPLTRKMSMDAQSVASQLNSSGLLRTQGLIGGKWSDAYDGKTIKVYNPATGESIVDVACMGGRETNDAISAAYDAYGSWSKTTAAERSKFLRKWYDLLMVHKEELAQLITLEQGKPLKESVGEINYGAGFIEFAAEEAKRIYGDIIPAPLSDRRLFVLKQPVGVVGAITPWNFPLAMITRKVGPALACGCTVVIKPSELTPLTALAAAELSIQAGIPPGVVNVVMGNAPDIGDALLASPQVRKITFTGSTAVGKKLMAGSAETVKKVSLELGGNAPCIVFDDADLDVAVKGTLAAKFRNSGQTCVCANRIIVQEGIYEKFANALRDTVQNMKVGDGFSEGVAQGPLINEAAVKKVESLIHDATSKGAKVILGGKRHSLGFTFYEPTVISDVNSDMRISREEAFGPVAPLLRFKTEEDAIRIANDTNAGLGSYIFTNSIQRSWRVAEALEYGLVGVNEGVISTEVAPFGGFKQSGLGREGSKYGMDEYLEIKYVCLGNMHKA

SEQ ID NO: 70237 - DNA, 1786 bp, Glycine max
  CDS (9)..(1619)
acactatcatggcttcttcactcagaatctcaagacttatctctcgctccttttcttctacttctttcttttcacgaggtgggaatggtttccttggttcaagacaaagtaaattcagcacttctgctgccattgaggaagaacccattaaaccatcaatacaagtagaacacacccaactcttaattgatggaaaatttgtagatgctgcttctggtaaaacttttcaaactttagatcctaggacaggtgaagtgattgctcatgttgctgagggtcactctgaagatgttgatcgagcagtttcagctgcacgaaaagcatttgatcatggaccatggcctaagatgacagcttatgaacggcaaaggatcttgttgcgtgtggccgatctgatcgagaagcataatgatgagcttgcagcacttgagacttgggataatggaaagccttatgaacaagctgctaagattgaagttccaatgcttgttcgcctgattcgatactatgctggttgggcagataagattcatggtctaacagttccagctgatggaccttatcatgtgcaaacattgcacgaaccgattgatgttgccggtcagatcattccatggaacttccctcttctcatgtttgcctggaaggttggaccggcattggcctgtggcaacaccattgttctcaaaacagctgagcagacaccattatctgctttatatgcagcaaaactatttcatgaggctggacttcctgctggtgttttgaatgtagtttccggctttggtccaactgctggtgctgctcttgctagtcacatggaggttgataagcttgcttttaccggttccactgatactgggaaagttgtccttgaactggcggctaaaagcaatcttaagcctgttactttggagcttggtgggaaatctccctttatagtgtgtgaagacgctgatgtagatcaggctgttgagctcgcacactttgccttattctttaatcagggacaatgttgctgtgctgggtctcgaacatttgtacatgaaaatgtatacgaggagtttgttcagaaagcaaaggctcgtgctttgagacgtgttgttggtgatccattcaaggggggaatagagcaaggtcctcagattgattcagaccaatttgagaaaatactgaggtacatcagatccggtgttgaaagcggggcaacccttgaaacaggaggagacaagcttggcaacaagggcttctacattcaacctacagtcttctcaaatgttaaggatggcatgctgattgcaaaggatgagatctttggtccagtccaatccatattaaaattcaaggaccttggtgaggtagttcaaagagcgaacaacacacgttacgggcttgcggcaggagtgttcacaaagaacatggacactgcaaacactttgacgcgggcactgagagttggaacagtttggataaactgctttgacacatttgatgctgcaattccctttggagggtacaaaatgagtggtcaaggcagagaaaaaggagagtatagtctcaaaaactacttgcaagtgaaggctgtcgttaatcccttgaagaacccagcatggctttgagaaacactagtgccttccttggatgatcaactatcagtgcctcaatgataatgatgataaaaacaaaatccttttttttttttgttacacgagttgagttatgacattgtaaacataatagtaaagaatcttgtcaatgaaaaaaaaaaaaataaaaaaaaaaaaaa

SEQ ID NO: 70238 - protein, 536 aa, Glycine max
MASSLRISRLISRSFSSTSFFSRGGNGFLGSRQSKFSTSAAIEEEPIKPSIQVEHTQLLIDGKFVDAASGKTFQTLDPRTGEVIAHVAEGHSEDVDRAVSAARKAFDHGPWPKMTAYERQRILLRVADLIEKHNDELAALETWDNGKPYEQAAKIEVPMLVRLIRYYAGWADKIHGLTVPADGPYHVQTLHEPIDVAGQIIPWNFPLLMFAWKVGPALACGNTIVLKTAEQTPLSALYAAKLFHEAGLPAGVLNVVSGFGPTAGAALASHMEVDKLAFTGSTDTGKVVLELAAKSNLKPVTLELGGKSPFIVCEDADVDQAVELAHFALFFNQGQCCCAGSRTFVHENVYEEFVQKAKARALRRVVGDPFKGGIEQGPQIDSDQFEKILRYIRSGVESGATLETGGDKLGNKGFYIQPTVFSNVKDGMLIAKDEIFGPVQSILKFKDLGEVVQRANNTRYGLAAGVFTKNMDTANTLTRALRVGTVWINCFDTFDAAIPFGGYKMSGQGREKGEYSLKNYLQVKAVVNPLKNPAWL

SEQ ID NO: 70239 - DNA, 2180 bp, Zea mays
  CDS (77)..(1774)
cgcgaatcgccgcggacctcgccggaggcggcgacgagctcggatcccggcgatctagtcgccggaggcggtcccgatggctcggcggtcgtcttcctcgtcgtcggggacctggcggtacctgaacccggcgtactacctcaagcggcccaagcgcctggcgctcctcttcttcgtcttcgtcgcggccaccttcgccttctgggaccgccagtcgctcgtcagcgagtacgagtctgagatttcccgattagaagatgatataaatcggttgcatgaccagctaagaaaggctggagttaatctggatgaaaatccagtagtaagcaataagaattccagaaaagatcttgtagtagaaattgatcctgtcaataatgaaagacgggaaaaagttaaagaggcaatgctccatgcttggaattcttatgttaagtatgcctggggaatggacgagcttcagccacaatcgaagaatggtatcaacagctttggtggtcttggagcaacccttgttgactcacttgataccctatacataatgggcctgaaagatgaatttcagaaagctagagactgggtggcggagtcattagactttgacaaggattatgatgcgagtgtttttgaaacgaccataagggttgttggaggtctgcttagttcatacgatctatctggtgataaagtatttcttgataaggctaaagatattacagatcgactcttacctgcttgggatacaacatctggcatcccttataatagaataaacctagctcatggacgagcccataatcctggatggactaacggtgatagtatccttgcagattctggtacggagcaacttgaattcatagctctgtcacagaggactggagatcccaaataccagcagaaggcggagaacgtcattaaacagcttcaaaagatatatccaagtgatggtttactgcctatttacataaatcctcattctgggacagcatcatactcaactatcacatttggtgctatgggagacagcttctacgaatatttgctcaaggtctggatccaggggaataaaactgagcatgtaaaacactacagacaaatgtgggagacatcaatggaaggtctattaagtttaaccaagaaaactacaccatctaattactactacatttgtgaaaagaatggtggctcgttgtctgacaagatggatgaacttgcttgctttgctcctggtatgctggccttaggagcctctggttacgggccagaaaaatcagagcaaattatgaatcttgcaaaagagcttgctaggacctgctataatttctaccaaaccactcccacgaagttggctggagaaaattattttttccatactggacaggacatgggtgtggtcacgtcgtggaacatcttgagaccggagactgttgaatcactgatgtacctgtggcgcttgacggggaataaaacataccaagattgggggtgggacatattccaggcatttgagaagaactcccgcatagaatctggatatgtgggactgagagatgtgaacactggtgaaaaagacaacatgatgcagagtttcttcctggcagagacgctgaagtacctgtacctacttttctcccctccatcagtcatatccttcgacgagtgggttttcaatactgaagctcacccattgagaattgttccagtaagtgataacaaaggcattggaacaccggtccgacaattcgggagaaaacagggaaagcctgagtaaccttggatatagagcagtggatttttgaatctgccgtctgattctgacctccctgttgatgtgttctgacacgagggaactttctgcctgaagcagtaagggttagaaattacggcgatagattgtttagagcaaaaatcataggtagaggatgatgttatatgcggggcagtgacctccgtgaggtcaagagccccatagaagcttttatctttggatttgcttacgcaccctgaggtgcattgttgatgtgtagcatacatctaactcactgtccatatgttgttgctttcctgggggctctgcgagctgtattgtcattatgtaccccctagttattacttcttttcagatatgattcatataaatataaaacgtaaagtatctatgcaaaaaaaaaaaaaaa

SEQ ID NO: 70240 - protein, 565 aa, Zea mays
MARRSSSSSSGTWRYLNPAYYLKRPKRLALLFFVFVAATFAFWDRQSLVSEYESEISRLEDDINRLHDQLRKAGVNLDENPVVSNKNSRKDLVVEIDPVNNERREKVKEAMLHAWNSYVKYAWGMDELQPQSKNGINSFGGLGATLVDSLDTLYIMGLKDEFQKARDWVAESLDFDKDYDASVFETTIRVVGGLLSSYDLSGDKVFLDKAKDITDRLLPAWDTTSGIPYNRINLAHGRAHNPGWTNGDSILADSGTEQLEFIALSQRTGDPKYQQKAENVIKQLQKIYPSDGLLPIYINPHSGTASYSTITFGAMGDSFYEYLLKVWIQGNKTEHVKHYRQMWETSMEGLLSLTKKTTPSNYYYICEKNGGSLSDKMDELACFAPGMLALGASGYGPEKSEQIMNLAKELARTCYNFYQTTPTKLAGENYFFHTGQDMGVVTSWNILRPETVESLMYLWRLTGNKTYQDWGWDIFQAFEKNSRIESGYVGLRDVNTGEKDNMMQSFFLAETLKYLYLLFSPPSVISFDEWVFNTEAHPLRIVPVSDNKGIGTPVRQFGRKQGKPE

SEQ ID NO: 70241 - DNA, 2253 bp, Hordeum vulgare
  CDS (8)..(2023)
gcagccgatgcggctgcggagccaaggccggggttcccccctcctctgcctctccgccgccctcctcgcggtcgccctgctccccggcgccgccgtcgcagacggcgtcacgcctaccgaggcgctccggctacgcgacgaggtgaaagatatgttttatcatgcatttgatgggtacatgcaacatgcttttccacttgatgaactgcgaccgttgagttgtcaaggggaagactcccttggtggttatgcacttactcttatcgactctttggatactctggctttactaggtgataaggagagatttgctgctggtgtggagtgggttggtaagaacgtccgctttgatatcaacaaaactgtctcagttttcgagaccaatatacgtatccttggcggtctgttatcagctcacttgattgccagtgactatgccactggtatgaagattgagtcttatgatgatcagttacttcatttggccgctgacttagcccagaggttattacctgcatttgacactcctacaggtattccatttggatctgttaatttactgtatggagtcgatgatgatgaaagcaagataacatcgacggctggtggtggcactttgacattggagttcggtgtcttgagtcggttgactaataacactgtttttgagcaagttaccaaaaattcagtgcgtgggatatgggcacgcaggtcaaaactcaaccttgttggagcccatataaatgtcttcactggtgaatggacacaaaaggatgcaggaatcggcacaagcatcgactcattctacgaatatcttctgaaggcatatttattgttcggagatgaagaatacttgtatgtatttgaagaggcttacaaggctgccatgcactacctccaccatgatccttggtatattgaggtaaatatgaattctggtgctactgtttggccactattcaatagtctgcaggcattctggccaggacttcaggttttagctggagatgtcgatcctgccattcgaacacatgctgccttctttagcgtctggaaaaaatatgggttcactccagaagggtttaatctcgctacatctactgttcagaatggacaacggagctacccgctgcggcctgagttgattgaaagcacatattggctattcaaggctaccagagattttaggtaccttgatgttggaagggacatactagcaagccttcaatatgctgctaaatgtccttgtggctactgccacatatcagatgtggaaacccacaagcaggatgaccacatggagagttttttccttgcagaaacggtaaaatatctctggcttctttttgatttagctgtaggccctgataacattgttgaaaatgggccttataaatacatattcagcacagaaggccatttgttacctgctactcccgaaatatccttggtagatgagcattgcctttattttgaagcattctgtaataacagtacagaccgtggctacatcagcgctgatggttccagtaaacatccaagtgttaactgcacccattttgatgaaagacagactgtttccagtcaaaattcattgtccaatgttttgtctacaacaagaggttacatcaagggagtttgtccaggattgagtcatgcacagaaacttggcatatcgtaccatgacaacacggtagagcagaattccagaagtcatgagaaccccgatgaatcttacacggaccaatccagtgtccagattcaatcaagttctgtgatattgatctctcatccagccacaagcccacccgatgagcctttggaaaccgggtcaagaactcaataccttgaaaatattgtggtaactggcgactctgagccggtagaagttagtggctcgtcccaagggaacaccgaaaaccttgctgaggacaccaccttaggcatctctgaacagatagaagttactgctgctgaagaggttgggtctcaggacattcatattgaagatggtaccagctgaccaatggagtaggcaccaattttcccacctaacttggagcaccttatgaatcgacattcattgaccgattttgttgtagatctgaaagtaatattctttcgtagctgtcagatatatgtttaacgatatggttttgatcaaatagctgatgtaaagttatgtacaccagaagcaaaggaactacatggccgaaatgcaacatactacagtatcacaaaaaaaaaaaaaaa

SEQ ID NO: 70242 - protein, 671 aa, Hordeum vulgare
MRLRSQGRGSPLLCLSAALLAVALLPGAAVADGVTPTEALRLRDEVKDMFYHAFDGYMQHAFPLDELRPLSCQGEDSLGGYALTLIDSLDTLALLGDKERFAAGVEWVGKNVRFDINKTVSVFETNIRILGGLLSAHLIASDYATGMKIESYDDQLLHLAADLAQRLLPAFDTPTGIPFGSVNLLYGVDDDESKITSTAGGGTLTLEFGVLSRLTNNTVFEQVTKNSVRGIWARRSKLNLVGAHINVFTGEWTQKDAGIGTSIDSFYEYLLKAYLLFGDEEYLYVFEEAYKAAMHYLHHDPWYIEVNMNSGATVWPLFNSLQAFWPGLQVLAGDVDPAIRTHAAFFSVWKKYGFTPEGFNLATSTVQNGQRSYPLRPELIESTYWLFKATRDFRYLDVGRDILASLQYAAKCPCGYCHISDVETHKQDDHMESFFLAETVKYLWLLFDLAVGPDNIVENGPYKYIFSTEGHLLPATPEISLVDEHCLYFEAFCNNSTDRGYISADGSSKHPSVNCTHFDERQTVSSQNSLSNVLSTTRGYIKGVCPGLSHAQKLGISYHDNTVEQNSRSHENPDESYTDQSSVQIQSSSVILISHPATSPPDEPLETGSRTQYLENIVVTGDSEPVEVSGSSQGNTENLAEDTTLGISEQIEVTAAEEVGSQDIHIEDGTS

SEQ ID NO: 70243 - DNA, 1596 bp, Zea mays
  CDS (68)..(1297)
gaattcccgggtcgacgatttcgtagcagacacctccgccacctccaccctcgaatcgttccccaccatggcgtcgcagggatcctccgtcttcgccgcactcgagcaggccccggaggaccccatcctcggagtgaccgttgcctacaacaaggatcccagccccatgaaggtcaacctcggggttggcgcctaccggaccgaggaagggaagcccctagtgctgaacgtggtcaggcgcgccgagcaaatgttgatcaataatccgtcacgtgtcaaggagtacctaccaatcaccggtctggctgaattcaataagctgagcgctaagcttatctttggcgctgacagccctgctattcaggagaatagggttgctaccgtgcagtgcctatcgggtactggttctttaagagtcggaggtgaatttcttgcaaggcactatcacgagcgcactatctacatcccacaaccaacctggggaaatcacccaaaagtcttcaccctatctggcttgaacgttaggagctaccgctattatgatcctgcaacatgcagccttcacttcgaaggactcatggaagacctcggttctgctccttcaggttcaattgtactgctgcatgcctgtgcccacaaccctactggagtagatcctaccatcgaacagtgggaacagattaggcagctgatgagatcaaaatcactgcttccgttctttgacagtgcctatcaaggctttgcaagtggaagtcttgacaaagatgctcagtcagtgcgtatgtttgttgctgatggtggtgaactgctcatggctcagagctacgctaagaacatgggattgtatggagagcgtgttggcgctttgagcattgtatgtagaagtgccgatgtagctgttagggttgaaagtcaactcaaacttgtcatcaggcctatgtattcaaaccctcctcttcatggtgcctctattgttgctaccatactcagggacagcgagatgttcaacgaatggactctggaactgaaggccatggctgataggatcattaacatgaggcaacaactatttaatgcgctgaaatccagaggaacccctggtgattggagccatatcattaagcaaattgggatgtttactttcactgggctgaatagcgaacaagtggcattcatgaggcaggaataccacatttatatgacatctgatgggaggatcagcatggccggtttgagcatgaggactgtgccccatcttgcagatgccatacacgctgcagttactcaactgaaatgaggatagtatcgcagctttcgtgaataaaacctgaatcacccacaacaatgttctaagtactcagccagtggtatttactggttgacctactgtagtttgcgtcggaatagatttgtttttttactctgttcgtggggcagttttgtattggtggattcataatgactctgattatggtgcgttgggaacttctaataatatgcacatgaaattttgcttcaggtgcaaaaaaaaaaaaaaaaaaaaaaaaaaaaaaaaaaaaaaaaaaaaaataaaaaaaaaaaaaaaaaagcggccgc

SEQ ID NO: 70244 - protein, 409 aa, Zea mays
MASQGSSVFAALEQAPEDPILGVTVAYNKDPSPMKVNLGVGAYRTEEGKPLVLNVVRRAEQMLINNPSRVKEYLPITGLAEFNKLSAKLIFGADSPAIQENRVATVQCLSGTGSLRVGGEFLARHYHERTIYIPQPTWGNHPKVFTLSGLNVRSYRYYDPATCSLHFEGLMEDLGSAPSGSIVLLHACAHNPTGVDPTIEQWEQIRQLMRSKSLLPFFDSAYQGFASGSLDKDAQSVRMFVADGGELLMAQSYAKNMGLYGERVGALSIVCRSADVAVRVESQLKLVIRPMYSNPPLHGASIVATILRDSEMFNEWTLELKAMADRIINMRQQLFNALKSRGTPGDWSHIIKQIGMFTFTGLNSEQVAFMRQEYHIYMTSDGRISMAGLSMRTVPHLADAIHAAVTQLK

SEQ ID NO: 70245 - DNA, 1450 bp, Brassica napus
  CDS (31)..(1272)
gcaatccgtaactccgcttcacgggggacgatgatgagccgtcagatctcggggttgagatccatgtcttcgtggtggaagaacgtcgagcccgctcccaaagatcccatcctcggagtcaccgaggcctttctcgctgatcctagtcccgacaaagttaacgttggtgtgggagcatatcgagatgataatgggaagcctgttgtcttggaatgtgtccgtgaagctgagcgtaggatcgctggcacctccttcatggagtatcttccgatgggagggagtgtcaaaatggtggacgagacattgaagcttgcctatggggacaactctgagtttatcaaagacaaaaggattgctgcagttcagtctctctccggcactggagcttgccggctcttcgcagacttccagaaacgtttccgtcccgattcgcagatctacattcctgtaccaacctggtccaaccaccacaacatctggagagatgcacaagtcactcaaaagacgtaccattactaccatccagaaaccaagggcttggatttctcagggttgatggatgatgtgaagaatgctccgcaaggctccttcttccttctccacgcttgtgctcacaatcctactggagtagaccctacagaggagcaatggagagagatctcacagctattcaaggccaaaaaccatttcgcattcttcgacatggcctatcaaggctttgcaagcggtgaccctgcgagagacgccaagtccatcaggatctttctcgaggacggtcatcatattggaatctctcagtcttatgctaagaacatgggactctacggccagagggtcggatgtctcagcgtgctttgtgaagatgagaagcaagccgtgactgtgaaaagccagttgcagcaactagctagaccaatgtacagcaacccacctttgcatggagctcaaatagtctcaaccattctcggagacccagcgttaaaaggcctctggctaaaggaagttaaggtcatggctgatcggataattggcatgagaactgctttgagagaaagcttagagaagttaggatcgcctctatcatgggagcacgtaaccaagcagattggaatgttctgctacagtgggatgacaccagaacaggttgaccgtttaacaagcgaatatcacatctatatgacccgtaatggtcgtatcagtatggccggtgttacaacaggaaacgtgggataccttgcgaatgctatacatgaagtcaccaagtcatcttaaattgttttacatgtctcaagtcgagagataaatttgtttctttttgaaagagttaataagacagaggaagcttacaacatttgttcttcttcaattgttttggtggggactgaaagtcttacccacaaacagtaacttatcagcgcaataaaattttgaaccgcaaaaaaaaaaaaaa

SEQ ID NO: 70246 - protein, 413 aa, Brassica napus
MMSRQISGLRSMSSWWKNVEPAPKDPILGVTEAFLADPSPDKVNVGVGAYRDDNGKPVVLECVREAERRIAGTSFMEYLPMGGSVKMVDETLKLAYGDNSEFIKDKRIAAVQSLSGTGACRLFADFQKRFRPDSQIYIPVPTWSNHHNIWRDAQVTQKTYHYYHPETKGLDFSGLMDDVKNAPQGSFFLLHACAHNPTGVDPTEEQWREISQLFKAKNHFAFFDMAYQGFASGDPARDAKSIRIFLEDGHHIGISQSYAKNMGLYGQRVGCLSVLCEDEKQAVTVKSQLQQLARPMYSNPPLHGAQIVSTILGDPALKGLWLKEVKVMADRIIGMRTALRESLEKLGSPLSWEHVTKQIGMFCYSGMTPEQVDRLTSEYHIYMTRNGRISMAGVTTGNVGYLANAIHEVTKSS

SEQ ID NO: 70247 - DNA, 1535 bp, Brassica napus
  CDS (89)..(1306)
taactttgatactctcaaaaagcttcgtgaagaaaaaaaaagataaattctcttcatccagattcatctttttacgatacttgctctaatggagtccgtcttctcaaacgtcgttcgtgctcccgaagatcctattctcggtgtgacggttgcttacaataatgatccaagcccagctaagctcaatttgggtgtcggtgcctatcgaactgaggaagggaagccacttgttcttgacgtggtgcgaagggcggagcaacagcttgtgaacgatccgtcccgggtcaaggaatacattcctattgctggacttgctgattttaacaaacttagcgctaagctcatcttaggtgctgatagtcctgcaattcaagagagtagagttgctacaatccagtgcttgtctggtactgggtcattgagagttggggctgagtttctcaaaaaacactaccaccaaagtgtcattttcattccgaaaccaacttgggggaaccatcccaaagttttcaacctggctggcttgtctgtggagtactaccgttactatgatccctcgacccgtggacttgacttccaaggcttactcgaggatcttggtgctgcaccatctggagcgattgtcttacttcatgcatgtgctcacaatcccactggagttgacccaacctctgaacagtgggaacagattcggcaactaataagatctaaaagcttgttaccgttttttgatagtgcatatcagggttttgctagtggtagcctagacacagatgcacattcagtccgcacctttgttgctgatggcggtgaatgcttgatagctcaaagttatgccaaaaatatgggactctatggggagcgtgttggtgcccttagcattgtctgcaagtcatcagatgtggctagtaaggttgagagccaggtgaaacttgttgtgcgacccatgtactcgagcccacctattcatggagcatcaattgttgccaccattctgaaaagcagtgatatgtacaatgactggaccatcgagctgaaaggaatggctggccgcattattagcatgcgccaacacttatttgaagctctacaagctaaaggcacacctggtgattggagtcacattatcaaacagattgggatgttcacttttactggattgaacaaggagcaagttgccttcatgaccaaagagtttcacatttacatgacatctgacgggagaataagcatggcaggtctcagttcgaagacggtgcctcacctggttgaagctatacatgctgcagttacccgcgtcgcctaaactaaagcgagacgatatttttcttgtttcgtcgaataaaatgaaattttcaaaaacaaaaaaaaaaacatcttccttggtttatagactaaggatttttcccattggtatcatatgtttcctcatatctttttggccaaggatgtttgaaccaaacaaaccgagtattgcgacactgaaatcttcaatgttgaaggaaaatattggttattagcaaaaaaaaaaaaaa

SEQ ID NO: 70248 - protein, 405 aa, Brassica napus
MESVFSNVVRAPEDPILGVTVAYNNDPSPAKLNLGVGAYRTEEGKPLVLDVVRRAEQQLVNDPSRVKEYIPIAGLADFNKLSAKLILGADSPAIQESRVATIQCLSGTGSLRVGAEFLKKHYHQSVIFIPKPTWGNHPKVFNLAGLSVEYYRYYDPSTRGLDFQGLLEDLGAAPSGAIVLLHACAHNPTGVDPTSEQWEQIRQLIRSKSLLPFFDSAYQGFASGSLDTDAHSVRTFVADGGECLIAQSYAKNMGLYGERVGALSIVCKSSDVASKVESQVKLVVRPMYSSPPIHGASIVATILKSSDMYNDWTIELKGMAGRIISMRQHLFEALQAKGTPGDWSHIIKQIGMFTFTGLNKEQVAFMTKEFHIYMTSDGRISMAGLSSKTVPHLVEAIHAAVTRVA

SEQ ID NO: 70249 - DNA, 1435 bp, Brassica napus
  CDS (75)..(1325)
aatcatgcttaaataattgaggactctacaaccttttcttccaaattcactatcgattgattagtcattttgtgatgagttccatcttgtcaaacgtccttcctgctccggaagatccttttctcagtgcttttaatcttctttgtatggtcacaaaacaggttatttttgcctgtagggatgatccttgtccagttaagttgaatttgagtgcgggtgcctatcgaaccgaggagggaaagcctcttgttcttgaggtggtgagaaaagcagagcaacagttagcgaatgacctatcttgtgacaagggttatctctcaattgatggacttgctgattttaacaaattgagcgccaagctgatcttaggtgatgatagtcatgcagtggatgagaatagagttgttactatccagtgtttgtctggtactggttctttgagagtcggagctgagtttctagcaaaacaccaccaacaacgagtcgttttcgttccaaatccaacttgggggaaccatccctttattttcacattggcgggtttaagtgtagagtatttccgttactatgatccgcaaacccgaggactcgacttcgaaggcatgctcgaggatcttggtgctgcaccgcctggagctattgtggtattgcaatcttgtgcgcataaccccacaggaattgacccaacactggaacaatgggaaaagattcgacaaattgtgaggtctaaaggtttattacccttctttgataatgcatatcagggttttgctagtgggaaccttgactcagatgcacaatcggtgcgtatgtttgttgctgatggaggtgaatgtttgatagctcaaagttttgccaaaaacatgggtctttatggtgagcgtattggtgctcttaccattgtatgcacctcacaagatgtggctaggaaaattcacagtcaagtgttacttgttgttagacctatgtatcttagcccaccaattcatggagcatccattgttaccacaattcttaaaaacagtgatatgtacaaggactggactatcgagctgaaaggcatggctgaccgcatcataagcatgcgccaacagttatatgaagctatacaagctagaggtacacccggtgattggagtcacattatcaaacagattgggatgttttcttttacaggactgaatgagaagcaagttcgttggatggccaaagaatatcacatttatattacttatgatgggaggataagcattgcaagtctaagttcaaagacagtgcctcaactcgctgatgctatacatgctgcagttacccgccttgcctaatccaatgattctgttcttttgttgtttcataaataaattggttaaaaacagagttcctggttaacatttcattagcgaaaacaaagaagcgtacttaaaaaaaaaaaaaa

SEQ ID NO: 70250 - protein, 416 aa, Brassica napus
MSSILSNVLPAPEDPFLSAFNLLCMVTKQVIFACRDDPCPVKLNLSAGAYRTEEGKPLVLEVVRKAEQQLANDLSCDKGYLSIDGLADFNKLSAKLILGDDSHAVDENRVVTIQCLSGTGSLRVGAEFLAKHHQQRVVFVPNPTWGNHPFIFTLAGLSVEYFRYYDPQTRGLDFEGMLEDLGAAPPGAIVVLQSCAHNPTGIDPTLEQWEKIRQIVRSKGLLPFFDNAYQGFASGNLDSDAQSVRMFVADGGECLIAQSFAKNMGLYGERIGALTIVCTSQDVARKIHSQVLLVVRPMYLSPPIHGASIVTTILKNSDMYKDWTIELKGMADRIISMRQQLYEAIQARGTPGDWSHIIKQIGMFSFTGLNEKQVRWMAKEYHIYITYDGRISIASLSSKTVPQLADAIHAAVTRLA

SEQ ID NO: 70251 - DNA, 1633 bp, Glycine max
  CDS (49)..(1332)
cctctctgttcgcactctgtctttcccctgtttccgcgtcactgagtcatggcgattcgcaactcgctcaccggccaattcctccgccgcagctccgtcgccggagcaaggctcatgtcttcttcgtcctcatggttccggagcatcgagcccgctcccaaggatcctatcctcggagtcactgaagctttcctcgccgatcagagtccaaacaaagtcaacgtcggagtgggtgcgtatcgcgatgaccacggaaaacctgtggttttggaatgtgttagagaagcagagaggagggttgccggaagtcaattcatggagtatcttcccatgggtggaagcataaaaatgatagaagaatcgctgaagctggcatttggagacaactctgagttcatcaaggataaaagaatagctgcagtgcaggctttatctgggactggtgcatgtcgactttttgctgcatttcaacagagatttcatcctaatacccaaatctatataccagtgcctacctgggccaaccaccataacatttggagagatgctggagtgcctatgaagacattccgttactatcaccctgagtctagaggattggatttttcaggactgatggatgacataaagaatgctccagatggttccttctttctgcttcatgcttgtgctcataatcctactggagtagatccttcagaagaacaatggagagagatctcttcccagataaaggctaagggtcatttccctttctttgacatggcatatcaaggttttgctagtggtgatccagagagagatgcaaaagccataaagatttttcttgaggatggtcatttaataggacttgctcagtcatatgcaaaaaatatgggactgtatggccagcgagcaggaagcctgagtgtgctttgtgaagatgagaaacaagctgtggctgtaaaaagtcagttgcagctgattgctagacccatgtacagtaacccacctctccatggagcacttatagtttctactgtccttggtgatccagatttgaagaagttatggcttaaagaagtcaaggttatggcagaccgcatcatcggaatgaggactacactacgagaaaacttagaaaagaaggggtctactttgccatggcagcatataactaatcagattggtatgttctgctacagtggattgacacctgaacaggttgatcgtatgacaaacgagtttcatatttacatgacccgtaacggtcgtatcagtatggctggtcttaatacgggcaacgttggatatgttgctgacgctatccatgaggttacaaaatcattctagattattcaatcacccaacaggtgaccaaatttttgtctttggagacaaacatctcagaagtagtacccttatccaggggagcaaaataaatttaataaagtctgacaaattttcaacttgtttcggggtaagatagtgatactcttcagggtttaccttgcatattgaagacccttattgcaatacgtatccgatttatcatatccatgcaccatagattatatccatttttacagacatcttgtttagcactttaatgagcataaccctgtatcatcattttttttaaaaaaaaaaaaaa

SEQ ID NO: 70252 - protein, 427 aa, Glycine max
MAIRNSLTGQFLRRSSVAGARLMSSSSSWFRSIEPAPKDPILGVTEAFLADQSPNKVNVGVGAYRDDHGKPVVLECVREAERRVAGSQFMEYLPMGGSIKMIEESLKLAFGDNSEFIKDKRIAAVQALSGTGACRLFAAFQQRFHPNTQIYIPVPTWANHHNIWRDAGVPMKTFRYYHPESRGLDFSGLMDDIKNAPDGSFFLLHACAHNPTGVDPSEEQWREISSQIKAKGHFPFFDMAYQGFASGDPERDAKAIKIFLEDGHLIGLAQSYAKNMGLYGQRAGSLSVLCEDEKQAVAVKSQLQLIARPMYSNPPLHGALIVSTVLGDPDLKKLWLKEVKVMADRIIGMRTTLRENLEKKGSTLPWQHITNQIGMFCYSGLTPEQVDRMTNEFHIYMTRNGRISMAGLNTGNVGYVADAIHEVTKSF

SEQ ID NO: 70253 - DNA, 1692 bp, Brassica napus
  CDS (138)..(1499)
gaattcccgggtcgacgtaagccacttgaagagggagcatcacccaaggaagaacctctttcacgctaacacaatctcgatctgatcgttttcgaaaccgcgcggttccaacgaagctcagcttaccgattgattccatggcttcatcaatgctgtctctcggttctacttctctgctacctcgcgtgattaacaaggataagctaaagcttggaacttccggttccaaccccttcctgaaagcaaagtcttttagcagggtgaccatgtcggttacagtcaagccttctcgctttgagggtatcactatggctccaccagaccctattcttggagtcagcgaagctttcaaagctgacactaacgagcttaagctcaatctcggtgttggtgcttatcgaactgaggaactccagccttatgtccttaatgttgttaaaaaggcggagaacctgatgttggagagaggagataacaaagagtatctcccaatcgaagggttggctgcattcaacaaggccactgctgagctgctgtttggagctggtcatcctgttattaaggaacaaaaggtggcaacaattcaaggtctttccggaacaggttcactgagactagcagcggctcttatcgagcgttattttcctggagctaaagtgcttatatctgcaccaacatggggtaaccacaagaacatcttcaacgacgccaaagttccctggtctgaataccgctactatgatcccaaaacaattggtttggactttgaagggatgatagcagatataaaggaagctccagaaggatcattcatactgctacacggatgtgctcacaacccaactggaatcgacccaacacctgaacagtgggtgaaaattgctgacgtcattcaagaaaagaaccacatcccatttttcgatgttgcataccagggctttgctagtggaagccttgacgaagacgcagcttccgtgagactatttgctgagcgtgggatggagtttttcgtcgctcagtcgtatagtaaaaacttgggtctttatgctgaaaggattggagctatcaacgtcgtctgctcatcagctgatgctgctacaagggtgaagagccagttgaaaaggatagctaggcctatgtactcgaacccaccggttcacggtgcgaggatcgtggctaatgtagtgggagatgcagctatgttcaacgagtggaaagcagagatggaaatgatggcggggaggattaagacggtgagacagcagctgtacgacagcctcgtttcgaaggataagagcggcaaagactggtcgtttattctgaagcagattggcatgttctcattcaccggtctcaacaaagctcagagtgataacatgacggacaagtggcatgtgtacatgactaaagacgggaggatatcgttggctggactgtctatggcgaaatgcgagtaccttgctgatgccatcatcgactcgtaccataacgtaagctgagttttggttttcgagaagattacaatgagaactgaagttttatttataccctttttagcttctccttcatctcatttgaaagaattgctaaaatgaataagctaagctcagctcaggctgttatatctatgacatttagtcaaggaaactttttttaatttgattgtgtttcacaggctaaaaaaaaaaaaaa

SEQ ID NO: 70254 - protein, 453 aa, Brassica napus
MASSMLSLGSTSLLPRVINKDKLKLGTSGSNPFLKAKSFSRVTMSVTVKPSRFEGITMAPPDPILGVSEAFKADTNELKLNLGVGAYRTEELQPYVLNVVKKAENLMLERGDNKEYLPIEGLAAFNKATAELLFGAGHPVIKEQKVATIQGLSGTGSLRLAAALIERYFPGAKVLISAPTWGNHKNIFNDAKVPWSEYRYYDPKTIGLDFEGMIADIKEAPEGSFILLHGCAHNPTGIDPTPEQWVKIADVIQEKNHIPFFDVAYQGFASGSLDEDAASVRLFAERGMEFFVAQSYSKNLGLYAERIGAINVVCSSADAATRVKSQLKRIARPMYSNPPVHGARIVANVVGDAAMFNEWKAEMEMMAGRIKTVRQQLYDSLVSKDKSGKDWSFILKQIGMFSFTGLNKAQSDNMTDKWHVYMTKDGRISLAGLSMAKCEYLADAIIDSYHNVS

SEQ ID NO: 70255 - DNA, 1601 bp, Triticum aestivum
  CDS (132)..(1412)
cagaacaacatagcggcacgcaacacgccagccgcagcaaagcaccggtgccgcgccgcttcctcaggacccaagtcacctgccatctcctccccagcagcggcaaactcgccaccgcacgcagcgacggcatggcgatgtctcgcgccgcggcagcggtcgggcggcgccggtgcgggccgcgcctgcccgcggcgaggtccatggcgtcgtggttcggccacgtggagccggccgccaaggaccccatcctcggcgtcaccgaggccttcctcgccgacccctcgccggacaaagtgaacgtcggcgtcggtgcgtaccgggacgacgacgggaagcccgtggtgctcgagtgcgtgcgcgaggcggagcggcgcatcgccgggagcaccaacatggagtaccttccaatgggaggaagcgtgaagatgatcgaggagtcgctgaagctggcatacggggaggattctgagttcatcaaggacaagaggattgcggcagtgcaggctctttcagggactggtgcatgtcgcctctttgcagatttccagaaacgcttcttgccggattcacagatctacatacctacgcctacatggtcaaaccatcacaacatttggagggatgcccaggtaccacaaagaacatttgcctactaccacccggaatcaagaggactggactttgcaggcctaatggatgatatcaagaacgctccagagggttccttctttttgcttcatgcatgtgctcacaatcccactggggtcgatccttctgaggaacagtggagagagatatctcaacaattcaaggtgaagaaccatttcccatttttcgacatggcataccaaggatttgccagtggtgacccagagagagatgccaaggcaattcggatctttctcgaagatggacatcaaattggatgtgcacagtcatatgcaaaaaacatgggactttatggccaaagagcaggatgccttagtattctctgcgacgatgaaatacaagcagttgatgtgaagagccagttacaacagattgccagacctatgtacagcaacccaccccttcacggcgcactaattgtttccactatccttggtgatccagcactgaaaagcttatggctgaaagaggtcaagggtatggctgatcgcattattggaatgcgaaaagcacttaaggagagccttgaaaagttgggttcaccattatcatgggaacatattactaatcagattggcatgttttgctacagcgggatgacacctgaacaagttgatcgcttaacaaatgaatttcacatatacatgactcgtaatggcaggataagcatggctggtgtaacaacaggaaatgtcgcatatttggctaacgctattcatgaggtcactaagccaatttaagaccccttcctccctcctgccattttgagaaataagaggagcctttcaacttcaagttgcagtttgcttttaatttccttaaaccttttatgttccaacaatgttgtttttatcaaacaatgtcccatattgttgtgacctatgggtgtgcaaatattgatttgtttcatcccgacacgcagcggccgc

SEQ ID NO: 70256 - protein, 426 aa, Triticum aestivum
MAMSRAAAAVGRRRCGPRLPAARSMASWFGHVEPAAKDPILGVTEAFLADPSPDKVNVGVGAYRDDDGKPVVLECVREAERRIAGSTNMEYLPMGGSVKMIEESLKLAYGEDSEFIKDKRIAAVQALSGTGACRLFADFQKRFLPDSQIYIPTPTWSNHHNIWRDAQVPQRTFAYYHPESRGLDFAGLMDDIKNAPEGSFFLLHACAHNPTGVDPSEEQWREISQQFKVKNHFPFFDMAYQGFASGDPERDAKAIRIFLEDGHQIGCAQSYAKNMGLYGQRAGCLSILCDDEIQAVDVKSQLQQIARPMYSNPPLHGALIVSTILGDPALKSLWLKEVKGMADRIIGMRKALKESLEKLGSPLSWEHITNQIGMFCYSGMTPEQVDRLTNEFHIYMTRNGRISMAGVTTGNVAYLANAIHEVTKPI

SEQ ID NO: 70257 - DNA, 1509 bp, Glycine max
  CDS (103)..(1362)
ccggttattctcaaaactaccacctctcttttggattcttcttcttcttcaccaccctgtgatcgcagactcaacactctcgctagacacttccttccgcaaatggcttctcacgacagcatctccgcttctccaacctccgcttctgattccgtcttcaatcacctcgttcgtgctcccgaagatcctatcctcggggtaactgtcgcttataacaaagatccaagtccagttaagctcaacttgggagttggtgcttaccgaactgaggaaggaaaacctcttgttttgaatgtagtgaggcgagttgaacagcaactcataaatgacgtgtcacgcaacaaggaatatattccgatcgttgggcttgctgattttaataaattgagtgctaagcttatttttggggctgacagccctgctattcaagacaacagggttaccactgttcaatgcttgtctggaactggttctttaagagttgggggtgaatttttggctaaacactatcaccaacggactatatacttgccaacaccaacttggggcaatcacccgaaggttttcaacttagcaggcttgtctgtcaaaacataccgctactatgctccagcaacacgaggacttgactttcaaggacttctggaagaccttggttctgctccatctggatctattgttttgctacatgcatgcgcacataaccccactggtgtggatccaacccttgagcaatgggagcagattaggcagctaataagatcaaaagctttgttacctttctttgacagtgcttatcagggttttgctagtggaagtctagatgcagatgcccaacctgttcgtttgtttgttgctgatggaggcgaattgctggtagcacaaagctatgcaaagaatctgggtctttatggggaacgtgttggcgccttaagcattgtctgcaagtcagctgatgttgcaagcagggttgagagccagctgaagctagtgattaggcccatgtactcaagtcctcccattcatggtgcatccattgtggctgccattctcaaggaccggaatttgttcaatgactggactattgagttgaaggcaatggctgatcgcatcatcagtatgcgccaagaacttttcgatgctttatgttccagaggcacacctggcgattggagtcacattatcaaacagattggaatgtttactttcactggattgaatgcggaacaagtttccttcatgactaaagagttccatatatacatgacatctgatgggaggattagcatggctggtctgagttccaaaactgtcccacttctggcggatgcgatacatgcagctgtaacccgagttgtctaaaacatgttgacaacagttttcaacatgctccctagtccctataggagaacttccattatttttgtttaataattgtcaacatcaacaatgaaaccttttatttgatgtgagatttttaaaggaaacttttctgaaaaaaaaaaaaaa

SEQ ID NO: 70258 - protein, 419 aa, Glycine max; identical to SEQ ID NO: 12975

SEQ ID NO: 70259 - DNA, 1624 bp, Hordeum vulgare
  CDS (91)..(1464)
ccaaggccatcgccatccacccgctccgctctgatcccagatcaccctcgccccctcctgctccgaacgctgcacctctcgccccagcggatggcctccgccctctccgcgccggcggcctccgccgtcgccgccgccgccgcccggcgcaaggtgttcggcggaggaaggaacgacgggagggccgggtgccgcgtcgggatcgcgaggaagaatactggccacatagcgatggcacttacagtacacgcttctcgctttgaaggagtgtcgatggcccctccagacccgatccttggggtctcggaagcgtttaaagcagatacaagtgatctgaagctcaaccttggtgttggcgcctacagaacggaagagctacagcccgcagtcctcaacgttgtcaagaaggctgaaaaacttatgctagagaaaggagaaaacaaagagtatctgcctattgaaggctttgctgcatttaacaaagcaactgcagatctattgcttggagctgacaatcctgtcatcaagcaaggacgggttgctactcttcagtctctctcagggactggatcattacgccttgctgcagcatttattcagagatacttccctgatgcaaaagtacttatatcatctcccacatggggaaaccacaaaaacatattcaatgatgctagggtgccatggtcagaataccggtattatgatcccaagactgttgggctggattttgaaggaatgatagctgacatacaggctgccccagaagggtcttttgttctgctacatggttgtgctcacaatccaactggaatagacccaactcctcaacagtgggagaaactggcagatctgattgaagagaaaaaacatatgcctttctttgatgttgcctatcaaggttttgccagtggaagccttgatgaagatgcatcctccgtcaggctttttgttaagcgtggcctggaagtgtttgttgcacagtcttacagcaagaaccttggtctatatgcagaaaggatcggtgcgataaatgtcatttgcacagcaccggaagttgcagatagggtgaagagccagttgaagcgattggcgcggcccatgtactcaaacccacctattcacggtgccaagatcgtcgccaacgttgttggagaccctaccatgttcggtgagtggaaagaagagatggaacaaatggcagggcggatcaagaatgttcggcagaagctttacgatagcttgactgcaaaggaccagtctggcaaggactggtctttcattcttagccagataggcatgttctccttcacgggcttgaacagaacccagagcgataacatgaccgataaatggcacatatatatgaccaaggacgggaggatttcgttggcagggctgaacctggcgaaatgcgagtaccttgctgatgccatcatcgactccttccacaatgtcaactagattacgatttgcgtcgcagccacgctattgtgagtagttccttctatagtttgctgggatttttgggtccttccagctcgagttgtaagtcaggatgctgatgatgtgtccgttaattcagaggtacagtaataaataatctggcaaaaaaaaaaaaaaa

SEQ ID NO: 70260 - protein, 457 aa, Hordeum vulgare
MASALSAPAASAVAAAAARRKVFGGGRNDGRAGCRVGIARKNTGHIAMALTVHASRFEGVSMAPPDPILGVSEAFKADTSDLKLNLGVGAYRTEELQPAVLNVVKKAEKLMLEKGENKEYLPIEGFAAFNKATADLLLGADNPVIKQGRVATLQSLSGTGSLRLAAAFIQRYFPDAKVLISSPTWGNHKNIFNDARVPWSEYRYYDPKTVGLDFEGMIADIQAAPEGSFVLLHGCAHNPTGIDPTPQQWEKLADLIEEKKHMPFFDVAYQGFASGSLDEDASSVRLFVKRGLEVFVAQSYSKNLGLYAERIGAINVICTAPEVADRVKSQLKRLARPMYSNPPIHGAKIVANVVGDPTMFGEWKEEMEQMAGRIKNVRQKLYDSLTAKDQSGKDWSFILSQIGMFSFTGLNRTQSDNMTDKWHIYMTKDGRISLAGLNLAKCEYLADAIIDSFHNVN

SEQ ID NO: 70261 - DNA, 1836 bp, Glycine max
  CDS (42)..(1598)
acaattcacaaccttcaaacatatttataagaataacaccaatggatactccaatgaccctcacgggcttgctccgcgacgtcgccgccaaattcccttcccgccgcgccatctccgtcgccggaaaattcgacctcacccactcccgcctccatcaactggttgaatccgccgccgcccgcttagtcgccgccggaatcaaacccggcgacgtcatcgctctcaccttccccaataccgtcgagtttgttgtcttgtttctagccgtcattcgagtgcgcgccacagccgcgccgttaaacgcggcttacacagccgaagagtttgagttttacttgtccgactccgagtccaagcttcttctaacatcagcagaaggaaacaactcagctcaagccgcagcttcaaaactcaacatccttcacagcacagcttcaataacccaagccggagacaaagaagccgagctgagcctctcattaagccactccgagtcagagtcaattaactcggttgagtcactcggaaacgatccagatgacgtggcgcttttccttcacacctcgggcaccacgagccgacccaagggagtgcctttgacgcaacacaacctgttctcttccgtgaacaacattaaatcggtgtaccgactcactgagtccgactcgacggtgatcgttcttcctttattccacgtgcacggtttgatcgcggggctcctgagttcgctcggcaccggggcggcggtggcgctgccggcagcggggagattctccgcctcgtcattctggaaggacatgattaaatacagcgccacgtggtacacagcggttcctacaatacaccagatcatactggaccgccactcgaacagccccgaaccggtttacccgcgcctccggttcattcgaagctgcagcgcgtcgctcgcaccggctattctgggtaaacttgaggaggccttcggtgcgccagtgctggaggcttacgcgatgacggaagcgtcgcatttgatggcttcgaaccctttgccgcaagatgggccccacaaggccgggtcggttgggaaacccgtgggtcaagaaatggttatattggacgaaacgggtcgggttcaagatgctgaagttagtggagaggtttgcattaggggtcctaatgttacgaagggatataaaaataacgtggatgccaatacggcggcgtttttgtttggttggtttcacaccggtgatgttgggtacttggattctgatgggtatttgcatctcgtgggtcggatcaaggagctcatcaaccgaggaggagaaaagatatcaccaatagaagtggatgctgtccttctttcacacccagacattgctcaggcagttgcttttggagtgcctgatccaaagtatggggaggagatatactgtgctgtaatcccaagagaaggatcagacattgatgatgcagagttgctaagatattgcaagaagaatcttgcatctttcaaagtccccaaaaaggtcttcattaccgattctttgcccaagactgccaccggaaagattttgcgtcgtcttgtggcagaacactttgtctctcaaatttgagcaactcaagtcctacatttgaagactccatacctggccatacatagttggagtccacacaccataaatttcaacagtagtttggcaacttggcatttaggaggaggatatttctgcaaatggtctttcatacaggatacagtatattgtagttttcaatgattcatgtgaaatgttcacagggtaatgttttcaaggttttaaagatcttaaataatttctcaaaaaaaaaaaaaaa

SEQ ID NO: 70262 - protein, 518 aa, Glycine max
MDTPMTLTGLLRDVAAKFPSRRAISVAGKFDLTHSRLHQLVESAAARLVAAGIKPGDVIALTFPNTVEFVVLFLAVIRVRATAAPLNAAYTAEEFEFYLSDSESKLLLTSAEGNNSAQAAASKLNILHSTASITQAGDKEAELSLSLSHSESESINSVESLGNDPDDVALFLHTSGTTSRPKGVPLTQHNLFSSVNNIKSVYRLTESDSTVIVLPLFHVHGLIAGLLSSLGTGAAVALPAAGRFSASSFWKDMIKYSATWYTAVPTIHQIILDRHSNSPEPVYPRLRFIRSCSASLAPAILGKLEEAFGAPVLEAYAMTEASHLMASNPLPQDGPHKAGSVGKPVGQEMVILDETGRVQDAEVSGEVCIRGPNVTKGYKNNVDANTAAFLFGWFHTGDVGYLDSDGYLHLVGRIKELINRGGEKISPIEVDAVLLSHPDIAQAVAFGVPDPKYGEEIYCAVIPREGSDIDDAELLRYCKKNLASFKVPKKVFITDSLPKTATGKILRRLVAEHFVSQI

SEQ ID NO: 70263 - DNA, 1989 bp, Brassica napus
  CDS (70)..(1725)
cgcaaaaccaaaacttctccaaagctttgaaaagaaaaaccaaagtgttaaattgtctaaaaacttagaatggctccacaagaagacgccatgcagaaacagagcagcaacaagagtgacgtcatattccgatcaaagcttccggatatttacatcccgaaccacctccctctccacgactacatcttccaaaacatctccgagttcgcctccaagccttgcctgatcaacggtcccaccggccacgtgtacacttactccgaggtccatgtcgcttcccgtcgcatcgccgccggttttcaaaaactcggcgttaaccaaaacgacgtcgtgatgatcctcctctcgaattgccccgagttcgtcctctctttcctcgccgcctccttccgcggcgcaacggccaccgccgctaacccgtttttcactccggcggagatcgccaaacaggccaaagcctcgaactcgaagctcatcgtcaccgagtctcgctacgtcgataaaatcaaagacctccaaaacgacggcgttataatcgtctgcaccgacgaggaaccttctccgatcccggaaggctgcctccgattcaccgagttgactcagtcaaccgaaattgaaacggtggagatttcttccgacgacgtggtggcgcttccttactcctccggcacgacgggtctacccaaaggagtgatgctgactcacaagggactagtcacgagcgtcgctcagcaagtcgacggcgataatccgaatctttacttccacagcgatgacgtcatactctgtgtcttgcccatgttccatatctacgctttgaactcgatcatgctgtgtgggcttagagttggtgcctcgatcttgatcatgccaaagttcgagattaatctgctcttggagctgatacagaggtgtaaagtgacggttgctccgatggttccgccgattgttttggcgatggcgaagtcgccggagacggagaagtatgacttgagctcgattagggttgtgaaatctggtgctgctccgcttggtaaggagcttgaagatgccgtcagtgccaagtttcctaacgccaaactcggtcagggatacggaatgacggaagcaggtccggtgctagcaatgtcgttagggttcgcgaaagagccgtttccagtgaagtcgggagcttgtggtacggtggttagaaacgccgaaatgaaaatcatcgatccagacaccggagactcactttccaaaaacaaacctggagagatttgcatccgtggtcaccagatcatgaaaggttacctcaacaacccggcggctacatcagagaccatagacaaagacggctggcttcacacgggagatatcggattgatcgatgacgacgacgagcttttcattgtcgatagattgaaagaacttatcaagtacaaaggttttcaagtggctccggctgagctagaggctctcctcatcggtcatcaggatatcaccgacgtggccgttgtcgccatgaaagaagaggctgctggtgaagttcccgttgcgtttgttgtgaaatccaaggattcagagttatcagaagatgatgtgaaacaattcgtggcgaaacaggttgtgttttacaagagaatcaacaaagtgttcttcgttgagtccattcctaaagctccgtcagggaagatattgaggaaagacctgagggcaaaactagcaaatgggttggtaaactaaagaaacgaaacgcaaaagatgttccattgtatatacatacaactgtttgacgatcccaatgaaggactagagaaactcatacgaatcaatcaatgcctgtttctttttgtctttgtgttgttgttgtctttggttcatgtaatgaaccttttgtaataaaaggtggtttctttttttttgggtttcatgtaacttgtgctggagaagaccagcagactttttcataaaataaattactgttgttaaagcaaaaaaaaaaaaaaa

SEQ ID NO: 70264 - protein, 551 aa, Brassica napus
MAPQEDAMQKQSSNKSDVIFRSKLPDIYIPNHLPLHDYIFQNISEFASKPCLINGPTGHVYTYSEVHVASRRIAAGFQKLGVNQNDVVMILLSNCPEFVLSFLAASFRGATATAANPFFTPAEIAKQAKASNSKLIVTESRYVDKIKDLQNDGVIIVCTDEEPSPIPEGCLRFTELTQSTEIETVEISSDDVVALPYSSGTTGLPKGVMLTHKGLVTSVAQQVDGDNPNLYFHSDDVILCVLPMFHIYALNSIMLCGLRVGASILIMPKFEINLLLELIQRCKVTVAPMVPPIVLAMAKSPETEKYDLSSIRVVKSGAAPLGKELEDAVSAKFPNAKLGQGYGMTEAGPVLAMSLGFAKEPFPVKSGACGTVVRNAEMKIIDPDTGDSLSKNKPGEICIRGHQIMKGYLNNPAATSETIDKDGWLHTGDIGLIDDDDELFIVDRLKELIKYKGFQVAPAELEALLIGHQDITDVAVVAMKEEAAGEVPVAFVVKSKDSELSEDDVKQFVAKQVVFYKRINKVFFVESIPKAPSGKILRKDLRAKLANGLVN

SEQ ID NO: 70265 - DNA, 2025 bp, Glycine max
  CDS (60)..(1748)
gaattcccgggtcgacttcgctgtcgacgatttcgtcgtaaacacattcagacaccaccatgataactctagctccttctcttgatactccaaaaactgatcaaaaccaagtttctgatccccaaactagccatgtcttcaaatcaaaattaccagatatcccaatctccaaccacctccctctccactcctactgcttccagaacctctcccaatttgcccaccgcccttgcctcatcgtcggacccgcctccaaaaccttcacctacgccgacacccacctcatttccagcaagatcgccgccggattgtccaacctcggaatcctcaagggcgacgtcgtcatgatcctcctccagaactccgccgatttcgtcttctccttcctcgccatctccatgattggcgccgtcgccaccaccgccaacccgttctacaccgccccggagatcttcaagcagttcaccgtctccaaggcgaagtcgatcataacacaggcaatgtacgtggacaagctccgcaaccacgacggcgcgaagctcggcgaggacttcaaggtcgtaaccgtcgacgatccgccggagaattgcctccacttctctgtcctctcggaggcgaacgagagcgacgtgccagaggtggagatccacccggacgacgcggtggcgatgccgttctcctccggcacgacgggtttacctaaaggagtgattctcacgcacaagagtttaaccacgagtgtggcgcagcaagttgacggagagaaccctaacctctacctcaccaccgaggacgtgctcctctgcgtgcttccgctctttcacatattctcgctcaacagtgtgctattgtgcgccctcagggcggggagtgcagttttgttgatgcagaagttcgagatcgggacactgctggagctgatacagcggcaccgagtgtcggtggcgatggtggtgcccccgctggtgttggcgttggcaaagaatccgatggtggcggattttgacctgagttcaatacggttagtgctgtccggagctgctcccttggggaaggagctcgaggaggctctccggaacaggatgcctcaagctgttttgggacagggttacgggatgacagaagcagggccagtgctgtccatgtgcttgggctttgcaaagcaacctttccaaacaaaatcaggctcttgtggtaccgtagtcagaaatgcagaactcaaggttgttgaccctgaaactggtcgttctcttggctacaatcaacccggtgaaatttgcatccgagggcaacagatcatgaaaggatatctgaacgatgaggcagcgacagcatcgaccatagattcagagggttggcttcacaccggtgatgttggctacgtagatgatgatgacgaaattttcattgttgacagggtgaaggaactcatcaaatataaaggcttccaggtgccccctgcagaacttgaagggcttcttgtaagccatccctccattgcagatgcagctgttgtcccacaaaaggatgttgctgctggtgaagttcctgttgccttcgttgtgagatcaaacggctttgatctaactgaagaggctgtaaaagagtttatagctaaacaggtagtgttttacaaaagactgcacaaagtttattttgttcatgctattcccaagtctccatcaggaaagatattaaggaaagacctcagagcaaagctagaaaccgccgccactcagacgccttaaaggctagctagaacctgcccccttttttcttggcaatattttccttattttttatttatattattggtttcacacgtgtaatttacgtatcaatgcttcacggcattaagccaatccgagaagcagttgcacttacgtataatcattgtatttttatgtccattgtccaccaccatgtctgtattgtggttttagatcactaattttcgagaccttgtattattggtgttatcaaatccttgctattctgcaaaaaaaaccgacacgcagcggccgc

SEQ ID NO: 70266 - protein, 562 aa, Glycine max
MITLAPSLDTPKTDQNQVSDPQTSHVFKSKLPDIPISNHLPLHSYCFQNLSQFAHRPCLIVGPASKTFTYADTHLISSKIAAGLSNLGILKGDVVMILLQNSADFVFSFLAISMIGAVATTANPFYTAPEIFKQFTVSKAKSIITQAMYVDKLRNHDGAKLGEDFKVVTVDDPPENCLHFSVLSEANESDVPEVEIHPDDAVAMPFSSGTTGLPKGVILTHKSLTTSVAQQVDGENPNLYLTTEDVLLCVLPLFHIFSLNSVLLCALRAGSAVLLMQKFEIGTLLELIQRHRVSVAMVVPPLVLALAKNPMVADFDLSSIRLVLSGAAPLGKELEEALRNRMPQAVLGQGYGMTEAGPVLSMCLGFAKQPFQTKSGSCGTVVRNAELKVVDPETGRSLGYNQPGEICIRGQQIMKGYLNDEAATASTIDSEGWLHTGDVGYVDDDDEIFIVDRVKELIKYKGFQVPPAELEGLLVSHPSIADAAVVPQKDVAAGEVPVAFVVRSNGFDLTEEAVKEFIAKQVVFYKRLHKVYFVHAIPKSPSGKILRKDLRAKLETAATQTP

SEQ ID NO: 70267 - DNA, 1927 bp, Glycine max
  CDS (86)..(1729)
gaattcccgggtcgacttcgctgtcgacgatttcgttcaatctccaggctatctatcaagtaagaaagctgttaagaggaggagaatggctgatgatggaagcaggagggaattgatattcaggtcgaagcttccggatatctacatccccaaacatatgcccctccactcttactgcttcgagaatttgagagagtgtggttcacgcccctgcctgatcaatgcccccacgggagacgtctacagctaccacgaggtggacagcaccgccagaaaggtggcgagggggctgaagaaagagggcgtggaacagggccaggtcatcatgatcctcctccccaattgccccgaattcgtcttctcgtttcttggcgcatcccaccgcggtgccatggccactgccgccaaccctttcttcacccccgccgagattgcaaagcaagcccatgcctccaatgccaagctcctcatcacccaggcctcttactacgacaaagtcaaggacctccgcgacatcaagctcgtattcgtcgactcttgtcccccccatacagaggagaagcagcatctccatttctcacatctgtgtgaggataacggtgacgctgatgttgatgttgatgttgatatcaagcccgatgacgtggttgcattgccttattcttcgggaacaactggtcttcccaagggagtgatgctgagccacaaggggctggtgaccagcattgctcagcaggttgacggtgataatcccaacctctattaccactgccacgacaccatcctctgcgtgcttcccctctttcacatttactctctcaactccgttcttctctgtggcttgcgtgccaaggctaccattctcctcatgcccaagttcgatattaactccttgcttgctctcattcacaagcacaaagtcactattgcccctgtcgtccctcccattgttctcgccatttccaaatcacccgatctccacaagtacgacctgtcttccatcagagtcttgaagtccgggggagcccctctgggtaaggaactcgaagacactctcagagctaaattccccaacgccaaacttggccagggatacggaatgactgaggcagggcctgtgctaacaatgtctttagcttttgctaaagaaccgatagacgtgaaaccaggtgcatgtggaaccgttgtaagaaatgcagagatgaagattgtcgatcctgaaaccggtcattctttacccagaaaccaatccggtgaaatttgcataagaggcgaccagattatgaaaggttatctaaatgatggagaggctacagagagaaccatagacaaagatggttggttgcacacaggtgacatcggttacatcgacgatgacgatgagttattcatcgttgacaggctcaaggaattgatcaaatacaaaggatttcaagtggctccagctgaacttgaagcccttcttctcactcatcctaagatctctgatgctgctgttgttccaatgaaggatgaagccgcgggagaggtacctgttgcatttgtggtcatatcaaatggttataccgacacaaccgaggatgaaattaagcagtttatctccaaacaggtggtgttttacaaaagaataaaccgagtattcttcattgatgcaattcccaagtcaccgtcaggcaaaatcttgcgcaaggatctaagagcaaagatagcggcaagtgttccaaaatgaaattaaaccaaacccatcatgttatggtgttattatacgatgcccgcataagcaagcttcaacacaaaaggaagaggcgctgttgcttgatcccgctagcttttacgtattttctcttacgtaacaaccgtgtataagttaccagtgtgattttcttacagaactatcttctgtaaagattccaaaaaaaaaaaaaaa

SEQ ID NO: 70268 - protein, 547 aa, Glycine max; identical to SEQ ID NO: 672

SEQ ID NO: 70269 - DNA, 402 bp, Unknown
  Unknown
  CDS (1)..(399)
atgaaagacacaatggaaactcctacgacactcaccaccttgctccgccacgtcgccgccaaattcccctcccgccgtgccatctccgtcgctgccaaattcgacctcacccactcccgcctccaccgcctggtcgaatccgccgccgctcagttagtctccgccggcgtcaaacccggcgacgtcgtcgccctcaccttccccaacaccatcgagtttgtagtcatgttcctagccgtcattcgggctcgagccacagccgcgccgttaaactcggcttacacagcggaagagttcgagttttacttatccgactcggagtccaagctcctcctaacatcaccagaaggaagaattgacatgtgtcatgtccatggccttatactgggtttcaaataatcc

SEQ ID NO: 70270 - protein, 132 aa, Unknown
  Unknown
MKDTMETPTTLTTLLRHVAAKFPSRRAISVAAKFDLTHSRLHRLVESAAAQLVSAGVKPGDVVALTFPNTIEFVVMFLAVIRARATAAPLNSAYTAEEFEFYLSDSESKLLLTSPEGRIDMCHVHGLILGFK

SEQ ID NO: 70271 - DNA, 1842 bp, Hordeum vulgare
  CDS (95)..(1339)
cgccgcgcaggctggaggaggtcgaattccctgccgcctagcgtcgcctcgtcccgaagaaggctagctgccccgcgagcggaccgcggcgcccatggcgttcgagaagatccaggttgccaaccccatcgtcgagatggacggtgatgagatgacacgaattatatggaaatggatcaaagataagcttatatttcctttcctggacctggacataaaatactttgacttaggtctacctaaccgtgacgctactggggataaagtaacgatagaaagtgcagaagctaccctaaagtataacgtggccatcaaatgtgcaactgtcaccccagatgaaggacgcgtaaaagagtttaatttaaaagctatgtggaggagtccaaatgggacaataaggaacatcttaaatggaactgttttccgagaaccaatcatctgcaagaatgttcctcggcttgtgcctggatggacaaaacccatatgcattggcagacatgcttttggtgatcaataccgagcaacagatataatcattagagggacagggaagctcaagttgatatttgatggcatagaggaacaaatagagttggatgtgttcaactttagtggtgctggtggagtagcattatctatgtataacactgatgagtctattcgagcatttgctgaagcttcgatgaacatggcttaccagaagagatggccactttatcttagtacgaagaacacaatcctgaaaaaatatgacggaaggtttaaagacatattccaacaaaactatgaaacaaattggagatgcaggtttgaggatgcaggaatatggtatgaacatagactgattgatgatatggtggcctatgccctaaagagtgaaggtggctatgtttgggcttgcaagaattatgatggagatgtgcagagcgatctaattgctcaaggttttggatcgttaggtctcatgacatcggttttggtgtgccctgatggtagaacagttgaagctgaagctgcacacggtacagtcacacgacattacagagtccaccaaaaaggaggcgaaactagcacaaacagcattgcgtcaatctttgcatggtctactggattagcacatagggcaaagctggatgacaacaaaagactgttggatttcacacaaaaacttgaagctgcttgtgtggggacagtggaatctggaaagatgacaaaggacctagctcttctcatccatgggccaactgttagtcgtgataagtatctgaacaccatggagttcattgatgcggttgctgaggagttgaggacaagattgtccgcaaaatcaaagttatgaaggtactacaagtaagataatttccttgtctatcagcttcttgtaatggttctgaagctcatgtaatgcttctgaagctcatgttttctcatctaagcattatctgccatttttgacacagcagcgataggacaagtgacttgttaggatcctataatacaaggtttacggtttacctttgtgctatgaataagagcgtgggcaacatatcttcgttatagtgctcaaatagagcctttggtgacagtctgaatgcacctccgaacaatgtaaggaagatgctgtctagctcgaaaataagaagttttttcttttctttttcaaatcaaattcctggtcagtttcaggtagctcttctcatagtgatgtccaaatcaagttgggcttcttacacctacacaccctaagtggtgtttgtaccaaagaaataagctggagtactttatttaaacattttaatgtcatgacatgaaatcgaatgccaatttaaaaaaaaaaaaaaa

SEQ ID NO: 70272 - protein, 414 aa, Hordeum vulgare
MAFEKIQVANPIVEMDGDEMTRIIWKWIKDKLIFPFLDLDIKYFDLGLPNRDATGDKVTIESAEATLKYNVAIKCATVTPDEGRVKEFNLKAMWRSPNGTIRNILNGTVFREPIICKNVPRLVPGWTKPICIGRHAFGDQYRATDIIIRGTGKLKLIFDGIEEQIELDVFNFSGAGGVALSMYNTDESIRAFAEASMNMAYQKRWPLYLSTKNTILKKYDGRFKDIFQQNYETNWRCRFEDAGIWYEHRLIDDMVAYALKSEGGYVWACKNYDGDVQSDLIAQGFGSLGLMTSVLVCPDGRTVEAEAAHGTVTRHYRVHQKGGETSTNSIASIFAWSTGLAHRAKLDDNKRLLDFTQKLEAACVGTVESGKMTKDLALLIHGPTVSRDKYLNTMEFIDAVAEELRTRLSAKSKL

SEQ ID NO: 70273 - DNA, 1591 bp, Brassica napus
  CDS (56)..(1306)
agtctcgtaggcaggccaggcacaaagcacttggagcagcagagaagaggcaaagatggaattcgagaagatcaaggtggccaatccgattgttgaaatggatggagacgagatgactcgagttatctggaaattcattaaagacaagcttattttaccttacctggagttggatatcaaatactttgatctcggactgcctaaccgcgattctactgatgataaggttactacagagagtgctgaagctactctaaagtataacgtggcaatcaagtgtgcgacgattactcctgatgaaactcgtgttagggagtttggtttgaaaaaaatgtggaggagtcctaacggaactataaggaacattttaaacggcacggtcttcagggaacctataatttgcagaaatatccctcgcattgtaccaggatggactaaaccaatctgtattggaaggcatgcttttggagatcagtatagagctactgatatcgttgttaatgaaccaggaaaactgaaactgattttcgagccaagtggatcttcacgtaagaccgaatttgaagtcttcaatttcactggtgctggaggtgttgctttggccatgtataacaccgatgagtctatccgttcatttgccgagtcatcgatgtacacagcttaccagaaaaaatggccgctgtacctctccacaaaaaacaccatcctcaaaacatatgacggaagattcaaggatatattccaagaagtttatgaaactaactggagatctaagtttgaagctgctgggatatggtatgagcatcgtctgatagatgatatggttgcttatgccatgaaaagtgaggggggttacgtttgggcatgcaagaactacgatggagatgtgcagagcgatttcttagcccaaggatatggatctctgggactgatgacgtcggtgttggtttgtcctgatggaaagaccattgaagcagaggcagctcatggcacagtaacacgccactacagagttcaccaaaaaggtggcgaaacaagcaccaacagcatagcctctatttttgcttggtccagaggccttgcccacagggcaaagctggacagcaatgcgtcgttgttgaactttactgagaaactagaagcggcttgtatggggacggtggagtctggaaaaatgaccaaggatctcgcgctgttgatccatggatccaaggttaagagggatgattatgtgaatactgaagagttcattgatgctgtggcgtgggagttaagaaaaagactgttaggcagctccaggttgtgaggagaagatttgaaaagcaaaaaacctttgcagtttccatcgagtaacattcatcatcataatgtgtagaaaataaaggcaagtgtgttgtatgtttgggcgtaaaaaggatgggtaataataattaaccgcccaactcaaaagctcctctcgtcctctgttgtaatggctgctactatttacttttcattagcttgaacctatctctcccagtctctcgctctctctaaatgaaggcggggagtaacgccttatctttgtaaaaaaagcaaaaaaaaaaaaaaa

SEQ ID NO: 70274 - protein, 416 aa, Brassica napus
MEFEKIKVANPIVEMDGDEMTRVIWKFIKDKLILPYLELDIKYFDLGLPNRDSTDDKVTTESAEATLKYNVAIKCATITPDETRVREFGLKKMWRSPNGTIRNILNGTVFREPIICRNIPRIVPGWTKPICIGRHAFGDQYRATDIVVNEPGKLKLIFEPSGSSRKTEFEVFNFTGAGGVALAMYNTDESIRSFAESSMYTAYQKKWPLYLSTKNTILKTYDGRFKDIFQEVYETNWRSKFEAAGIWYEHRLIDDMVAYAMKSEGGYVWACKNYDGDVQSDFLAQGYGSLGLMTSVLVCPDGKTIEAEAAHGTVTRHYRVHQKGGETSTNSIASIFAWSRGLAHRAKLDSNASLLNFTEKLEAACMGTVESGKMTKDLALLIHGSKVKRDDYVNTEEFIDAVAWELRKRLLGSSRL

SEQ ID NO: 70275 - DNA, 1663 bp, Brassica napus
  CDS (81)..(1532)
gctttttgcaataagacttgccgaagcttcgtgttcagtgatcgaagttgagaaacagaaagcgtagcgcggagtctcggatgctcaacaacctcacacgcggcggtttcatgtaccgtgccagcgtcacgatgttatcttcgtctacttcttcctcctcctctgctgctttatcgtcttcatggaagtctccgcgatttctcagctccggtgtgttatcgggtggtggttcgaggaatcgcgtggcctttcccgttcgttttcatcgcgctttatctgttcgatgttttgcctcttctggtggctctgataggattcaggttcagaacccaatcgttgaaatggacggtgatgaaatgacgagggtgatatggagtatgataaaggataaacttattttgccttatctggatctggatattaagtacttcgacttggggattctgaatcgcgatgctactgatgacagagttacagttgaaagtgctgaagctgctcttaagtacaacgttgctatcaaatgtgccactataactcctgatgagggcagagtgaaggagtttggactgaaatcaatgtggaggagtcctaatggaacaatcagaaacattttagatggaactgttttccgtgaacctatcatgtgtggcaatatccctcggcttgttcctggttggagaaaaccaatatgcattggtaggcatgcctttggtgaccagtatcgtgccacggatcaagtagttaaaggaccaggaaagttgaaaatggtttttgtcccagaagatgggagcgcacctgaggaactagacgtatatgatttcaaaggcccaggtgtagctctggctatgtacaacgtagatgagtcaattcgtgcttttgctgagtcatctatggcgatggcacttgcaaagaaatggccactatacttgagcaccaagaacacaattcttaaaaaatatgatggcaggttcaaggacatatttcaagaagtttatgaggcgaattggaagcaaaagtttgaagagcactcaatatggtatgaacatcgcttaatcgatgacatggtggcttatgcagtaaagagcgaaggtggatatgtctgggcttgcaaaaattacgacggtgatgttcaaagcgatcttcttgcccaagggtttggctcactaggcctcatgacctcagttttgttatcctctgatgggaaaacactcgagtcagaggcggctcatggaaccgtaactcgacatttccgactgcaccaaaagggacaagagaccagtactaatagcatcgcctccatatttgcatggacacgcggcttagaacacagggcaaaactggataagaacgaaaaattgatggattttgtcaagaagctcgagtcgtcgtgtgttaacactgttgagacagggaaaatgaccaaggatcttgcccttctggtccatggtcccaaggtgagtagggatgtgtacttgaacacagaagagttcattgatgcagttgcctccaatctccagtcaaagctcaattgagcctctacttttgtctgaccatttctgccaacaatacaaaaaataatgctcgccactgtttcacgttatgaacaaacaaaaaaactagtattggcgggtctagtgatttttcttttaaaaaaaaaaaaaaa

SEQ ID NO: 70276 - protein, 483 aa, Brassica napus
MLNNLTRGGFMYRASVTMLSSSTSSSSSAALSSSWKSPRFLSSGVLSGGGSRNRVAFPVRFHRALSVRCFASSGGSDRIQVQNPIVEMDGDEMTRVIWSMIKDKLILPYLDLDIKYFDLGILNRDATDDRVTVESAEAALKYNVAIKCATITPDEGRVKEFGLKSMWRSPNGTIRNILDGTVFREPIMCGNIPRLVPGWRKPICIGRHAFGDQYRATDQVVKGPGKLKMVFVPEDGSAPEELDVYDFKGPGVALAMYNVDESIRAFAESSMAMALAKKWPLYLSTKNTILKKYDGRFKDIFQEVYEANWKQKFEEHSIWYEHRLIDDMVAYAVKSEGGYVWACKNYDGDVQSDLLAQGFGSLGLMTSVLLSSDGKTLESEAAHGTVTRHFRLHQKGQETSTNSIASIFAWTRGLEHRAKLDKNEKLMDFVKKLESSCVNTVETGKMTKDLALLVHGPKVSRDVYLNTEEFIDAVASNLQSKLN

SEQ ID NO: 70277 - DNA, 1577 bp, Linum usitatissimum
  CDS (90)..(1325)
ccctcactcacattcccagtgttcttccatcgattcaatctcatctcaagagcgagctaacagagaagtccctgcatccagctacagccatggctttcgagaagatcaaggtcactaaccccatcgtcgagatggacggagatgaaatgacccgagttatatggcaatcaattaaggataagcttatcctcccatttgtggagttggacatcaagtactttgaccttggccttcctcatcgtgatgctaccgatgataaagttacagttgaaagtgcagaagctactctgaagtataatgtagcaatcaagtgtgctacaattactccagatgaagctcgagtcaaggagttcaacttgaaacaaatgtggattagtccaaatgggacaatcaggaatattttgaatggtactgtgtttagagaaccaattctttgtaaaaatgtcccccgtcttgttccaggttggacaaagccaatttgcattggcagacatgcttttggcgatcaatataaggcaaaagacactgtcattaaagggaagggcaaactcaaattgctgtttgttccagaagatggcgaggcacaagaaattgaggtttacaactttacaggtgctggtggggtagcacaggccatgtacaacactgatgagtccatccgctcatttgctgatgcttctatgaacgttgcttttgagaaaaagtggccactttatcttagcacaaaaaataccatcctcaagaagtacgacggaagattcaaggatatctttcaagaagtttatgaagctagctggaagtccaagtttgacgaggctggaatatggtatgagcaccgactcattgatgatatggtggcctatgctctcaagagtgaaggaggatacgtatgggcttgcaagaattatgatggagatgtccagagtgatttcttagctcaaggttttggatctcttggattgatgacatctgtactggtatgccctgatggaaagaccatcgaagctgaggcagcccacggaactgtcactcgccattacagagttcatcagaaaggtggtgaaaccagcaccaacagtatcgcttcaatctttgcttggactagaggacttgcacacagggcaaagctggacgacaatgctagactcctggaattcaccgagaaactcgaagctgcctgcatcggaactgtggagtctggaaagatgaccaaagatcttgcgctgatcagtcatggatccaacttgaccagggagcattacctcaacactgaggagttcattgatgctgttgctgctgagctgaagacagcactctctgcttgatttgactgctgagatgtggaagattgggctatggtgcgaaagctcttttgttgttttaatttcaccaaggcggggctgggttggttgagtggtctcattgcgaatgaataaaaggggggaatgggtattaagagatggctgagatttagttctagttacttgaactctgctctggattctcgattttaatctgtttacttcttccttgcttctctctattggacagaatattcacagaaaaaaaaaaaaaaa

SEQ ID NO: 70278 - protein, 411 aa, Linum usitatissimum
MAFEKIKVTNPIVEMDGDEMTRVIWQSIKDKLILPFVELDIKYFDLGLPHRDATDDKVTVESAEATLKYNVAIKCATITPDEARVKEFNLKQMWISPNGTIRNILNGTVFREPILCKNVPRLVPGWTKPICIGRHAFGDQYKAKDTVIKGKGKLKLLFVPEDGEAQEIEVYNFTGAGGVAQAMYNTDESIRSFADASMNVAFEKKWPLYLSTKNTILKKYDGRFKDIFQEVYEASWKSKFDEAGIWYEHRLIDDMVAYALKSEGGYVWACKNYDGDVQSDFLAQGFGSLGLMTSVLVCPDGKTIEAEAAHGTVTRHYRVHQKGGETSTNSIASIFAWTRGLAHRAKLDDNARLLEFTEKLEAACIGTVESGKMTKDLALISHGSNLTREHYLNTEEFIDAVAAELKTALSA

SEQ ID NO: 70279 - DNA, 1599 bp, Linum usitatissimum
  CDS (102)..(1352)
aaagtctcagctccgattctgtactccccaccggaagaacatctggagaaacgaaagacggtcggcggagcaagtagcagcatagaacagtttcgttagaaatgtctttccagaagatcagagtcaccaatcccatcgtcgagatggacggggatgaaatgactagagtgttctggaaatcgatcaaggataagcttatattccccttcttggatctggatatcaagtattttgaccttggcttaccaaaccgggatgccacaaacgatcaagtgaccatagatagtgctgaagctactcttaagtataacgttgctatcaagtgtgcaactataactccagatgaagaccgtgtaaaagagttcaacttgaaaaaaatgtggaggagccctaacgggacaattcggaacattctaaatggtactgttttcagagaaccaatcatctgcaggaacgttccacgtcttgtcccaggttggacaaggccaatatgcattggaaggcatgcatttggtgatcaataccgagcaactgatttggtcgtgggcgagcctggcaagctcaagatggtgtttgtgcctgatggacacagcaaaacaacagaacttgaggtttttaagtttactggagctggaggtgtaggtttggccatgtataacactgacgagtccattcgtgcttttgcggaggcttcgatgaacactgcataccataaaaggtggccgctttatcttagcacgaaaaataccatcctcaagaagtacgatggaagatttaaagacatatttcaggaagtttatgaaagcagatggaaatccaagtatgaagctgcaaaaatatggtatgaacatcgccttatcgatgatatggtcgcttactctctaaaaagcgacggagggtatgtctgggcgtgcaagaattacgatggagatgtccagagtgatttcctagctcaaggatttggttctcttggcttgatgacatcagtattggtatgcccagatggtaaaacaatcgaagctgaagcagctcatggcacagtgactcgccattaccgtgtccaccagaagggaggagaaacgagcacgaacagcattgcgtccattttcgcttggtcacgaggcttagctcacagggcaaagctggatggtaatgctcgactttcggacttcaccaagaagctcgaagcagcctgcgttggaactgtcgaatcaggaaagatgaccaaggatcttgctcttctcatccatggacccaaggttactagggctcagtacttgaatactgaagagttcattgatgcagtagcagaccagctgaaacaaagactaatggtcaaatcaaagctgtaactaaccaagtgtctgggcttagcctttagggacaacaatggctgaatggagaagaagattgaaccaatggtttttattaggctaaacgctcgagtttgagaaggaataaatgggatactagacgctttgttttagcgaaacggtagttgaagtcaacactatgtaacaaaacaatactgccgtacatatttagtcttcgatccgtttcgtgcaatcaacatgccatccactgaaaaaaaaaaaaaaa

SEQ ID NO: 70280 - protein, 416 aa, Linum usitatissimum
MSFQKIRVTNPIVEMDGDEMTRVFWKSIKDKLIFPFLDLDIKYFDLGLPNRDATNDQVTIDSAEATLKYNVAIKCATITPDEDRVKEFNLKKMWRSPNGTIRNILNGTVFREPIICRNVPRLVPGWTRPICIGRHAFGDQYRATDLVVGEPGKLKMVFVPDGHSKTTELEVFKFTGAGGVGLAMYNTDESIRAFAEASMNTAYHKRWPLYLSTKNTILKKYDGRFKDIFQEVYESRWKSKYEAAKIWYEHRLIDDMVAYSLKSDGGYVWACKNYDGDVQSDFLAQGFGSLGLMTSVLVCPDGKTIEAEAAHGTVTRHYRVHQKGGETSTNSIASIFAWSRGLAHRAKLDGNARLSDFTKKLEAACVGTVESGKMTKDLALLIHGPKVTRAQYLNTEEFIDAVADQLKQRLMVKSKL

SEQ ID NO: 70281 - DNA, 1610 bp, Helianthus annuus
  CDS (142)..(1392)
ccacctaccattcgtattaggcattcgccgtcctataaatatcctaaacccccactccgtcactatctcaccatctttctcactccgatctccggcaaacttttctccggcgatctcatcgttcgttcagaagcagtagcaatgtctttcgccaaaatcaaagtcgaaaaccccatcgttgagatggacggagatgaaatgactcgtgtcttttggcaatcaatcaaggataagctcattttccccttcgtagatctcgacattaagtattacgacctgggtcttcctaaccgtgatgctactgacgataaagttaccatcgaaagtgccgaagctactcttaagtacaatgttgcgattaagtgcgccaccattacccctgatgaggctcgtatgaaggagttcactttgaaaagcatgtggaagagtccaaacgggacgatcagaaatatattgaacggcacagtttttagagaaccaattctttgcaaaaatattcccaaactagttccaggatggacaaagcctatttgcatcggaagacatgcatttggtgatcaatacaaagctactgatgcagtgattaagggacccggaaagcttaagcttgtttttgttcccgaaggagaaggtgaaaacatagacttggaagtttacaacttcactggtgccggaggggtagctttgtcaatgtacaacactgaagagtccattgccgcttttgctgaggcctcgatgaacacagcttatcagaagaagtggccactttatcttagcacgaagaacactattctgaagaaatatgacggaagattcaaggacatatttcaagatgtttatgaaagcaactggaagtcgaagttcgaggctgctggaatatggtatgaacaccgtctcatcgatgatatggttgcttatgctcttaagagtgatggaggttatgtatgggcatgcaaaaactacgatggtgatgttcaaagtgatatgttggctcaagggttcggatcacttggattgatgacatcagtcttggtttgccctgatgggaagaccattgaatccgaagcagctcacggcactgtaactcgtcattacagagtgcatcaaaagggaggtgaaactagcactaatagtatagcctcaatctttgcttggacccgaggactggcccacagggcaaagttggacaacaacgctaagcttttggatttcactgagaagctggaagccgcatgtatcggaactgttgaatccggaaagatgacaaaggatcttgcactcattattcatggatccaagctcagtagggagcactatttgaacaccgaagaatttatcgatgctgtagccgatgagctgaaagcaagacttgtgggcaaatcatcactgtaagtgcatgatgagcagttgagagtaatgactggaccaagaagatttatgttcattgttccatgtgtttggttgaattcagcacaccattattgatatattggtggttattttaagaatttatattatgcttttttgtttaatctgggaacctgatttgatcagtttcagtttgaatggaatggaatggaagtttttatatttgcaaaaaaaaaaaaaaa

SEQ ID NO: 70282 - protein, 416 aa, Helianthus annuus
MSFAKIKVENPIVEMDGDEMTRVFWQSIKDKLIFPFVDLDIKYYDLGLPNRDATDDKVTIESAEATLKYNVAIKCATITPDEARMKEFTLKSMWKSPNGTIRNILNGTVFREPILCKNIPKLVPGWTKPICIGRHAFGDQYKATDAVIKGPGKLKLVFVPEGEGENIDLEVYNFTGAGGVALSMYNTEESIAAFAEASMNTAYQKKWPLYLSTKNTILKKYDGRFKDIFQDVYESNWKSKFEAAGIWYEHRLIDDMVAYALKSDGGYVWACKNYDGDVQSDMLAQGFGSLGLMTSVLVCPDGKTIESEAAHGTVTRHYRVHQKGGETSTNSIASIFAWTRGLAHRAKLDNNAKLLDFTEKLEAACIGTVESGKMTKDLALIIHGSKLSREHYLNTEEFIDAVADELKARLVGKSSL

SEQ ID NO: 70283 - DNA, 1897 bp, Glycine max
  CDS (133)..(1689)
gaaaacaccaactgttttgagttttccaaccttaaaaagactctctcttctctctctctctttctctccctgaagcaaaacaacattagcatcaaaaccagagtggttctagtaatccggtgctgctagaggatgggaactagtgaatggcatatcgagcgaagatctagcttcggcactgaatcccccttagcaagagaggcaggaaatgtgcctgaaactgggtcactctctattgttgtgcttggcgcttctggggatcttgctaagaagaagacatttcctgcacttttccatctataccggcagggattcttaccagcagatgaagttcacatttttggctatgcaaggacaaaaatatctgatgatgaattgagaaaccggttgcgtggctatcttgttccaaacaaaggtgcttctccccaactgttggaggatgtagagaagtttttacagctgatcaaatatgtaagtggctcttatgattctgaggatggatttcgcttgttggataaagagatttcagagcatgaatatttgaaaaagagtgttgagggtttatctcggaggcttttctatcttgctcttccaccttcagtatatccatctgtttgcaagatgatcaagacttgttgcatgaataaatctgatcttggtggatggacacgtgttgttgtcgagaagccttttggtaaggatctagaatctgcagaggaactcagtactgagattggaaagttgtttgaggaaccacagatttatcgtattgatcactacttgggaaaggaactagtgcagaacttgttggtacttcgctttgcaaatcggtttttcttgccactttggaaccgcgacaacattgacaatgtacagatagttttcagagaggattttggaactgatggccgtggtggatattttgaccaatatggaattattcgagatattattcaaaaccatttgctgcaggttctttgcttggttgctatggaaaaaccagtttctctcaggcctgagcacattcgggatgagaaagtgaaggttcttgaatcagtgctccctattagagatgatgaggttgttcttggacaatacgaaggctataaagatgacccaacagtacctgacaagtcaaacaccccaacatttgcaactgttattctgcgaatacacaatgaaagatgggaaggtgttccgttcatactaaaagcagggaaggcactaaattctagaaaggcagagatcagggttcaattcaaggatgtccctggtgatattttcaagtgtaaaaagcaggggagaaatgagtttgttatccgcctacaacctttagaagctatgtacatgaagcttacggtcaagcaacctggactggagatgtcaacagttcaaagtgagctagacttgtcatatggacaacggtatcaaggagtaaccattcctgaggcttatgaacgcctaattcttgacacaattaaaggtgatcagcagcattttgttcgcagagatgagttgaaggcatcctggcagatcttcaccccacttttgcacagaattgatgaaggggaattcaagccactcccctacaaaccaggaagcagaggtcctgcagaagcagatcagttacttgaaaaagcaggctatgttcaaacacacggctacatatggatccctcctaccttgtagagtaatctaatgtaataacatgaggaatctttagttgctaatgaatacacaataagcttgagaggcttcccttggaaccactcctcatgaatgtgtaatcaagcatttgaactatgagagtgtttgacacggtttgtgtaactgatttgcctttaaatgcaaaataaatggaaaatgaagtctatttaccggcaaaaaaaaaaaaaaa

SEQ ID NO: 70284 - protein, 518 aa, Glycine max
MGTSEWHIERRSSFGTESPLAREAGNVPETGSLSIVVLGASGDLAKKKTFPALFHLYRQGFLPADEVHIFGYARTKISDDELRNRLRGYLVPNKGASPQLLEDVEKFLQLIKYVSGSYDSEDGFRLLDKEISEHEYLKKSVEGLSRRLFYLALPPSVYPSVCKMIKTCCMNKSDLGGWTRVVVEKPFGKDLESAEELSTEIGKLFEEPQIYRIDHYLGKELVQNLLVLRFANRFFLPLWNRDNIDNVQIVFREDFGTDGRGGYFDQYGIIRDIIQNHLLQVLCLVAMEKPVSLRPEHIRDEKVKVLESVLPIRDDEVVLGQYEGYKDDPTVPDKSNTPTFATVILRIHNERWEGVPFILKAGKALNSRKAEIRVQFKDVPGDIFKCKKQGRNEFVIRLQPLEAMYMKLTVKQPGLEMSTVQSELDLSYGQRYQGVTIPEAYERLILDTIKGDQQHFVRRDELKASWQIFTPLLHRIDEGEFKPLPYKPGSRGPAEADQLLEKAGYVQTHGYIWIPPTL

SEQ ID NO: 70285 - DNA, 1782 bp, Brassica napus
  CDS (143)..(1693)
attttgcctccggtcgagatctcttgtcgttttctttgtctttctgatctttttcttttcctccgtttgttttgcgtgtttttgtgtttcgtggtagctgttgcacgtgtgagagtgtgacacgttcttgcttccgagaaagatggattctgggcagtggcacgttgagaagaggtccactttgaggaacgaatcgtttttaaaagagtacggtccagtctccgaaactggtagcctctccatcgtagttcttggtgcttctggtgatctcgccaagaagaagacttttcctgctcttttcaatctctaccaccaggggttccttaatccagatgaagttcatatctttggatatgcaaggagtaagatttctgatcaggagctgagagacaagatccatggatatcttgttgatgagaagaatgcttctgagaaagcggaagctttgtccaagtttctccagctgattaagtatgtgagtggtccttatgattctgaggacgggttcaaaaggctagaaaaggcaatctccgagcacgaaatctcgaaaaagacctctgaaggatcttcgaggagattgttttatcttgctctccctccctctgtataccctcctgtatgcaagatgatcaaggcatggtgcactaacacatctgatcttggtggatggacacgtgtcgtcgttgagaagccatttggaaaggacttggaatctgcagagcagcttagttcccagattggagcactgtttgatgagcctcagatttaccgtattgatcattacctgggaaaggaactagtccaaaacatgctggtccttaggtttgccaaccggttatttctgccgctatggaaccgtgacaacatagctaacgtccagattgttttcagggaagattttggaactgaaggccgtgggggatactttgatgaatacggaatcatccgtgatattattcaaaaccacttgctccaggttctttgccttgttgcaatggagaaaccagtctctcttaaacctgagcacatccgtgatgagaaagtgaaggttcttcaatcagtgatgcctataaaagatgaagaggtggttcttggacagtacgaaggttatagagatgatccaactgttccaaacgactcaaacactccaacctttgccacaacaattcttcgcatagacaatgaaagatgggaaggtgttccgtttatactgaaagccggaaaggcaatgagttcaaagaaggcagatattcggattcagtttaaggatgttcctggcgacatattcaaatgtcaaaagcaagggaggaacgagtttgtcatacgcttgcaaccttcggaggccatgtacatgaagctaactgtgaagcaaccgggtctagagatgcaaaccgtgcagagtgaactagacctatcttacaagcaacgttaccaagatgtcccgattccagaggcttacgagcgcctcattctcgacacaatcaaaggtgaccagcaacactttgttcgcagagatgagctgaaggcagcttgggaaatcttcactccactacttcacaggataggtaacggagaagtgaaatcgatcccatacaaaccaggaagccgagggccaacggaagcagatcagctgctagagaaaactggttatttgcagacccatggctacatatggatccctcctacgctgtaaacaaggagatgataatgagtgcactgcacatgaaataagagctcctctgtttttgttttcttgttttcttttccaaaaaaaaaaaaaaa

SEQ ID NO: 70286 - protein, 516 aa, Brassica napus
MDSGQWHVEKRSTLRNESFLKEYGPVSETGSLSIVVLGASGDLAKKKTFPALFNLYHQGFLNPDEVHIFGYARSKISDQELRDKIHGYLVDEKNASEKAEALSKFLQLIKYVSGPYDSEDGFKRLEKAISEHEISKKTSEGSSRRLFYLALPPSVYPPVCKMIKAWCTNTSDLGGWTRVVVEKPFGKDLESAEQLSSQIGALFDEPQIYRIDHYLGKELVQNMLVLRFANRLFLPLWNRDNIANVQIVFREDFGTEGRGGYFDEYGIIRDIIQNHLLQVLCLVAMEKPVSLKPEHIRDEKVKVLQSVMPIKDEEVVLGQYEGYRDDPTVPNDSNTPTFATTILRIDNERWEGVPFILKAGKAMSSKKADIRIQFKDVPGDIFKCQKQGRNEFVIRLQPSEAMYMKLTVKQPGLEMQTVQSELDLSYKQRYQDVPIPEAYERLILDTIKGDQQHFVRRDELKAAWEIFTPLLHRIGNGEVKSIPYKPGSRGPTEADQLLEKTGYLQTHGYIWIPPTL

SEQ ID NO: 70287 - DNA, 2034 bp, Brassica napus
  CDS (85)..(1797)
atcatgacagcctcacaaatgataagcagaggcaatcaaaatcacatatgaattttttgaagaaaattaatctaatatctctccatggcgacgcatactatgatcgttcgttcctcatcctctgctctcgctgcttcgtctccattaacagagactctaccactcttcactactagatctctcacattcccgagaaaatcctccttctctcgtcttcgcttgagattctttgccgaaaaactttctcagctcgactcctctaatcgctgtgcctctttacaagactctggagaacatcttacagaggagcatgacacaaaagaagagtcatccactcttagtattacagtggttggagcctctggagatttggccaataagaaaatattccctgcattgtttgctctcttttacgagggttgtcttcctcaggacttctctgtttttggttatgctcggaccaaactcacccatgaggagcttcgtgtcatgatcagtagaactttaacttgtcggatagaccaaagggagaactgtgtggacaaaatggatcagttcttaaagagatgcttttaccattcgggtcagtataactctgaagatgattttgcagaactaaacaccaagctcaaagagaaagaggaaggaaagctatcaaacaggctgtactatttgtcaattccaccaaacatattcgtggatgtggtaaggtgtgcaagccttagagcctcctcagtgaatggctggacaagagtcattgtcgaaaagccattcggtcgcgactctgaatcatctggagagttaaccagatgtcttaaacagtatctcacagaggagcaaatcttcaggatcgaccactatttgggaaaagaactcgttgagaacctttcagtgcttcgattctcaaatcttgttttcgagcctctttggtctagaaattacatacgcaacgttcaactcattttctctgaagactttggtacagaaggacgcggaggttactttgatcaatatggaatcatacgagacatcatgcaaaaccatctcttgcaaattcttgcacttttcgcaatggagacacctgtgagcttagacgctgaggacataaggagcgaaaaggtcaaagttctgaggtcaatgaaaccgttgctgcttcaagatatgattgtgggtcagtacaaaggtcatagcaagggtggaaaggcttatcctggttatacggacgacccaacagttcccacaaacagtctcactcctacatttgctgcagccgctatgttcatcaacaacgcgagatgggacggtgtccctttccttatgaaagctggaaaagctctgcataccagaggtgcagagatcagagttcagttcagacatgtcccggggaacttgtacaagaagaatttcgccactgatttagacaaggcaactaatgagctagtgatcagagttcaacctgatgaaggtatatacctgaggatcaacaacaaagtccctggtctcggaatgagactcgaccgaagcgaccttaaccttctctatcggtccaggtatccaagagagatcccagatgcatatgaaaggctgcttcttgatgctattgaaggagaaaggaggttgtttataagaagtgatgagttagatgcagcatgggatctattcacaccggctttgaaggagctcgagcacaagaaaatagttcctgagctatatccatatgggagcagaggtcctgttggcgctcattaccttgcatctaagtacaatgtgagatggggagatcttgaagatgcttaagcttttgacggaatcatggatatcaaattgatttggtgttaatttgggacgagctaactcttccatgtgttgtgagcttttacaacttttatcaaattcatcattacataggtttttttttgggccaaaaactatgtgtgatttcaactagtacatacattttgttcaaggaccgatgaccaaatgttagaattttatagttaactaggaaaaaaaaaaaataaaaaaaaaaaaaaa

SEQ ID NO: 70288 - protein, 570 aa, Brassica napus
MATHTMIVRSSSSALAASSPLTETLPLFTTRSLTFPRKSSFSRLRLRFFAEKLSQLDSSNRCASLQDSGEHLTEEHDTKEESSTLSITVVGASGDLANKKIFPALFALFYEGCLPQDFSVFGYARTKLTHEELRVMISRTLTCRIDQRENCVDKMDQFLKRCFYHSGQYNSEDDFAELNTKLKEKEEGKLSNRLYYLSIPPNIFVDVVRCASLRASSVNGWTRVIVEKPFGRDSESSGELTRCLKQYLTEEQIFRIDHYLGKELVENLSVLRFSNLVFEPLWSRNYIRNVQLIFSEDFGTEGRGGYFDQYGIIRDIMQNHLLQILALFAMETPVSLDAEDIRSEKVKVLRSMKPLLLQDMIVGQYKGHSKGGKAYPGYTDDPTVPTNSLTPTFAAAAMFINNARWDGVPFLMKAGKALHTRGAEIRVQFRHVPGNLYKKNFATDLDKATNELVIRVQPDEGIYLRINNKVPGLGMRLDRSDLNLLYRSRYPREIPDAYERLLLDAIEGERRLFIRSDELDAAWDLFTPALKELEHKKIVPELYPYGSRGPVGAHYLASKYNVRWGDLEDA

SEQ ID NO: 70289 - DNA, 2094 bp, Hordeum vulgare
  CDS (41)..(1909)
cgggatacggcggactgagaaagaagcgctaaccccgagcatggttacgacagtcctcgccgtggcggcttcagcagctccagcgccgcctccgtcgttggctgcgcgcttcagcccggttgcaggacctgctgtcggttttagagcgcattgttggattactgccaagatgaagctccacaaggccctggggaggcatggatggcaagtccagagaaagctggatattcgaggggatggtaaaattcctgactacttcgaggttgcatggcggactggaaatataactcgtcggaatgtacaacctgctggtgaaactggaggtgaaacggcaaatacaagctctgttatgtcagataactcgatcgatgacaaaggtttattgcatctgggactcaacaactctgaagctgatcgtcctgtactagaggaagaccttgttctgtttgataactttaatgaccaacctgaaagtgtaccatctctttgcattgctgtcattggagctactggcgaactggcaagaagtaaagtcttcccagcactatttgctctgtattacagtggttttcttcctcagaatgttgccatatttggatattctagaaagacattggcagacgaggatttaagatccatgattgaatccaatttgacctgtcgggtagatcaccacgaaaactgtgaagacaagttaaatgaattccttaaaaggacatactatgtcgatgcaggacacgataataaagatgggatggcgaaactaaatttgagaatgacacagatagagggcacttgtgcagcaaacaggatattctaccttgctgttccccaagaggcacttcttgatgtggcattgccattatctgacattgcccaaactaagcatggctggaataggataattatcgagaaaccatttggcttcactagtttgtcctcacaacgggtaacacagtctttgttgtcaagatttgaagagaagcaaatttaccgaattgatcatcttttggggaaggatctaattgaaaatctcactgtcttgagattttctaatttggtgtttgaaccattatggagtaggaagtacatacgtaatgtgcaggtcgttttttcagaagaaacatcaacagaaacacaagggaggtacttcggaaactatgggataatccgtgatatagtgcacagccacattcttcaaacgatagcactatttgctatggaaccacctgtaagtcttgatggggaggatatccgcgatgagaaggtgaaggtgctcagatcaattagaaaagtggacattgatgatgtcgtccttggtcaactcaaaaatacctgtggtaaagttgaccaatatacaaaatcaatgacacctacctacttggctgccgcaatgtacattgacaatgcacgttgggatggggtaccttttttgatcaagactggaatgggacttatggagaatagagctgagattcgtattcaatttcatcacgtccctggcaatatctaccgtgaacgttttggtcatgacatagatcttgacacaaatgagctggttttacgtgacctacccgaagaagccattctcttgaaagtcaacaataaggtcccgggtcttgggctccagttggatgcttcagagctcaacctactttacagagacaggtacgatgttgaagttccagattcatatgagcatcttcttttggatgttctagatggcgatagtcatctgttcatgcgaagtgatgaattagctgctgcatggagcgtgttggcgccaatactccatgagatcgaccagaagagggttgctcctgagctctacgaggctggggataaaggaccgattaatgcttactatctcgctgctaaacatggagtccgatgggatgatggctgctgagcggatgcttgggagctgctcaatgtatttcgcttccttctctctatgtagcaaaatctgtttggtaagaaatagagagaaaaaaagtgtttcttgcttgttgattcaaacccttccaaggtggatcaaagctactactccctccatcccaaaataaatgtctcaacattaaaaaaaaaaaaaaa

SEQ ID NO: 70290 - protein, 622 aa, Hordeum vulgare
MVTTVLAVAASAAPAPPPSLAARFSPVAGPAVGFRAHCWITAKMKLHKALGRHGWQVQRKLDIRGDGKIPDYFEVAWRTGNITRRNVQPAGETGGETANTSSVMSDNSIDDKGLLHLGLNNSEADRPVLEEDLVLFDNFNDQPESVPSLCIAVIGATGELARSKVFPALFALYYSGFLPQNVAIFGYSRKTLADEDLRSMIESNLTCRVDHHENCEDKLNEFLKRTYYVDAGHDNKDGMAKLNLRMTQIEGTCAANRIFYLAVPQEALLDVALPLSDIAQTKHGWNRIIIEKPFGFTSLSSQRVTQSLLSRFEEKQIYRIDHLLGKDLIENLTVLRFSNLVFEPLWSRKYIRNVQVVFSEETSTETQGRYFGNYGIIRDIVHSHILQTIALFAMEPPVSLDGEDIRDEKVKVLRSIRKVDIDDVVLGQLKNTCGKVDQYTKSMTPTYLAAAMYIDNARWDGVPFLIKTGMGLMENRAEIRIQFHHVPGNIYRERFGHDIDLDTNELVLRDLPEEAILLKVNNKVPGLGLQLDASELNLLYRDRYDVEVPDSYEHLLLDVLDGDSHLFMRSDELAAAWSVLAPILHEIDQKRVAPELYEAGDKGPINAYYLAAKHGVRWDDGC

SEQ ID NO: 70291 - DNA, 1640 bp, Brassica napus; identical to SEQ ID NO: 70115
  CDS (45)..(1496)

SEQ ID NO: 70292 - protein, 483 aa, Brassica napus; identical to SEQ ID NO: 70116

SEQ ID NO: 70293 - DNA, 2318 bp, Glycine max; identical to SEQ ID NO: 70117
  CDS (128)..(2110)

SEQ ID NO: 70294 - protein, 660 aa, Glycine max; identical to SEQ ID NO: 70118

SEQ ID NO: 70295 - DNA, 1771 bp, Glycine max; identical to SEQ ID NO: 70119
  CDS (278)..(1501)

SEQ ID NO: 70296 - protein, 407 aa, Glycine max; identical to SEQ ID NO: 70120

SEQ ID NO: 70297 - DNA, 1574 bp, Linum usitatissimum; identical to SEQ ID NO: 70113
  CDS (96)..(1547)

SEQ ID NO: 70298 - protein, 483 aa, Linum usitatissimum; identical to SEQ ID NO: 70114

SEQ ID NO: 70299 - DNA, 1279 bp, Brassica napus; identical to SEQ ID NO: 70193
  CDS (43)..(1119)

SEQ ID NO: 70300 - protein, 358 aa, Brassica napus; identical to SEQ ID NO: 70194

SEQ ID NO: 70301 - DNA, 1222 bp, Brassica napus; identical to SEQ ID NO: 70181
  CDS (45)..(1070)

SEQ ID NO: 70302 - protein, 341 aa, Brassica napus; identical to SEQ ID NO: 70182

SEQ ID NO: 70303 - DNA, 1319 bp, Brassica napus; identical to SEQ ID NO: 70183
  CDS (104)..(1126)

SEQ ID NO: 70304 - protein, 340 aa, Brassica napus; identical to SEQ ID NO: 70184

SEQ ID NO: 70305 - DNA, 1320 bp, Brassica napus; identical to SEQ ID NO: 70185
  CDS (61)..(1092)

SEQ ID NO: 70306 - protein, 343 aa, Brassica napus; identical to SEQ ID NO: 70186

SEQ ID NO: 70307 - DNA, 1522 bp, Brassica napus; identical to SEQ ID NO: 70187
  CDS (89)..(1285)

SEQ ID NO: 70308 - protein, 398 aa, Brassica napus; identical to SEQ ID NO: 70188

SEQ ID NO: 70309 - DNA, 1459 bp, Brassica napus; identical to SEQ ID NO: 70189
  CDS (178)..(1239)

SEQ ID NO: 70310 - protein, 353 aa, Brassica napus; identical to SEQ ID NO: 70190

SEQ ID NO: 70311 - DNA, 1297 bp, Glycine max; identical to SEQ ID NO: 70191
  CDS (56)..(1093)

SEQ ID NO: 70312 - protein, 345 aa, Glycine max; identical to SEQ ID NO: 70192

SEQ ID NO: 70313 - DNA, 1744 bp, Triticum aestivum; identical to SEQ ID NO: 70195
  CDS (126)..(1310)

SEQ ID NO: 70314 - protein, 394 aa, Triticum aestivum; identical to SEQ ID NO: 70196

SEQ ID NO: 70315 - DNA, 1448 bp, Zea mays; identical to SEQ ID NO: 70197
  CDS (204)..(1388)

SEQ ID NO: 70316 - protein, 394 aa, Zea mays; identical to SEQ ID NO: 70198

SEQ ID NO: 70317 - DNA, 1358 bp, Glycine max; identical to SEQ ID NO: 70199
  CDS (68)..(1138)

SEQ ID NO: 70318 - protein, 356 aa, Glycine max; identical to SEQ ID NO: 70200

SEQ ID NO: 70319 - DNA, 1858 bp, Glycine max; identical to SEQ ID NO: 70201
  CDS (317)..(1546)

SEQ ID NO: 70320 - protein, 409 aa, Glycine max; identical to SEQ ID NO: 70202

SEQ ID NO: 70321 - DNA, 1545 bp, Triticum aestivum; identical to SEQ ID NO: 70203
  CDS (160)..(1236)

SEQ ID NO: 70322 - protein, 358 aa, Triticum aestivum; identical to SEQ ID NO: 70204

SEQ ID NO: 70323 - DNA, 1322 bp, Hordeum vulgare; identical to SEQ ID NO: 70179
  CDS (14)..(1051)

SEQ ID NO: 70324 - protein, 345 aa, Hordeum vulgare; identical to SEQ ID NO: 70180

SEQ ID NO: 70325 - DNA, 1335 bp, Hordeum vulgare; identical to SEQ ID NO: 70205
  CDS (38)..(1114)

SEQ ID NO: 70326 - protein, 358 aa, Hordeum vulgare; identical to SEQ ID NO: 70206

SEQ ID NO: 70327 - DNA, 1574 bp, Zea mays
  CDS (30)..(1301)
gaattcccgggtcgacggttggttcgggaatggcgcaggcggtggtgccggcgatgcagtgccgggtcggagtgaaggcggcggcggggagggtgtggagcgccggcaggactaggaccggccgcggcggcgcctcgccggggttcaaggtcatggccgtcagcacgggcagcaccggggtggtgccgcgcctcgagcagctgctcaacatggacaccacgccctacaccgacaaggtcatcgccgagtacatctgggtcggaggatctggaatcgacatccgaagcaaatcaaggacgatttcgaaacccgtggaggatccctcggaactaccaaaatggaactacgatggatctagcacaggacaagccccgggagaagacagtgaagtcattctatacccccaggctatcttcaaggacccattccgaggtggcaacaacgttttggttatctgtgacacctacacgccacaggaggaaccccttccaactaacaaacgccacagggctgcgcaaattttcagtgacccaaaggtcgctgaacaagtgccatggtttggcatagagcaagagtacactttgctccagaaagatgtaaattggcctcttggttggcctgttggaggcttccctggtccccagggtccatactactgtgccgtaggagccgacaaatcatttggccgtgacatatcagatgctcactacaaggcatgcctctacgctggaatcaacattagtggaacaaacggggaggtcatgcctggtcagtgggagtaccaagttggacctagtgttggtattgaagcaggagatcacatatggatttcgagatacattctcgagagaatcacagagcaagctggggttgtccttacccttgatccaaaaccaattcagggtgactggaacggagctggctgccacacaaattacagcacaaagaccatgcgcgaagacggcgggtttgaagagatcaagagagcaatcctgaacctttctctgcgccatgatctgcatattagtgcatacggagaaggaaatgaaagaagactgactgggaaacatgagactgcgagcatcggaacgttctcatggggtgtggcaaaccgcggctgctctatccgtgtggggcgggataccgaggcaaaagggaaaggttacctggaagaccgtcggccggcatcaaacatggacccgtacattgtgacggggctactggccgagaccacgatcctctggcagccatccctcgaggcggaggctcttgccgccaagaagctggcgctgaaggtgtgaagcagctgaaggatggttcaggcaccaatataaaccggtccgcgacaagattgatctttgtgtccatggcgtgggtcttgcgactctctgctcggcggtgccactctgtacaaaatcacggctgtctttgattcatcggatattcggatacgtttgtttgttactttttgcttggacacccaccatgtttggaacttttttgggctccgtttgggggctgaacgatggtcagtggaaattttaaaaattcgtcgtcccaaaaaaaaaaaaaaa

SEQ ID NO: 70328 - protein, 423 aa, Zea mays
MAQAVVPAMQCRVGVKAAAGRVWSAGRTRTGRGGASPGFKVMAVSTGSTGVVPRLEQLLNMDTTPYTDKVIAEYIWVGGSGIDIRSKSRTISKPVEDPSELPKWNYDGSSTGQAPGEDSEVILYPQAIFKDPFRGGNNVLVICDTYTPQEEPLPTNKRHRAAQIFSDPKVAEQVPWFGIEQEYTLLQKDVNWPLGWPVGGFPGPQGPYYCAVGADKSFGRDISDAHYKACLYAGINISGTNGEVMPGQWEYQVGPSVGIEAGDHIWISRYILERITEQAGVVLTLDPKPIQGDWNGAGCHTNYSTKTMREDGGFEEIKRAILNLSLRHDLHISAYGEGNERRLTGKHETASIGTFSWGVANRGCSIRVGRDTEAKGKGYLEDRRPASNMDPYIVTGLLAETTILWQPSLEAEALAAKKLALKV

SEQ ID NO: 70329 - DNA, 1371 bp, Brassica napus
  CDS (89)..(1159)
gaattcccgggtcgacagcgaagtttattcgattttatctgtcatttgcttcagctgttactatcgaccaatctcggtgttcgtagccatgagtcttcttacagatctcgttaaccttaacctctcagagaccactgacaaaatcattgcggaatacatatgggttggaggttcaggaatggatatgagaagcaaagccaggactcttcctggaccagtgagtgacccttcggagctaccaaagtggaactatgatggctcaagcacaggccaagctcctggtgaagacagtgaagtcatcttataccctcaagccatattcaaagatcctttccgtagaggcaacaacattcttgtcatgtgcgatgcttacactccagcgggcgaaccaatcccaacaaacaaaagacacgctgcggctaaggtctttagccaccctgatgttgtagctgaagtgccatggtatggtattgagcaagagtacactttacttcagaaagatgtgaagtggcctgttggttggcctattggtggcttccccggtcctcagggaccatactattgtagtgttggagcagataaatcttttggtagagacattgttgatgctcattacaaggcctgcttatacgctggcatcaccattagtggcatcaatggagaagtcatgccgggtcagtgggagttccaagttggtccagctgttggtatctcggccggtgatgaaatttgggtcgcacgttacattttggagaggatcacagaggttgctggtgtggtggtatcttttgacccaaaacctattcccggtgactggaatggtgctggtgctcactgcaactatagtaccaagtcaatgagggaagatggtggttacgagattatcaagaaggcaatcgataaactgggaatgagacacaaggaacacattgctgcttatggtgaaggcaatgagcgtcgtctcacgggtcatcacgagactgctgacatcaacactttcctctggggtgttgcgaatcgtggagcatcaatccgtgtaggacgcgacacagagaaagaagggaaaggatactttgaggataggaggccagcttcgaacatggatccttacattgtgacttccatgattgcagagaccacaatcctctggaaaccttgatcagatcaaagaagattgttgaagaatgttcactccatttgggtttcttgcatggttcaacgtttgtatgtttctctatcaagcattgtctcagaacaaagtcaagagatttgctctgttcttatggcttttattgtttcacatccattgaaaacatctctttgtatcaatttatgaataaagtgtggtttggttctaaaaaaaaaaaaaaa

SEQ ID NO: 70330 - protein, 356 aa, Brassica napus
MSLLTDLVNLNLSETTDKIIAEYIWVGGSGMDMRSKARTLPGPVSDPSELPKWNYDGSSTGQAPGEDSEVILYPQAIFKDPFRRGNNILVMCDAYTPAGEPIPTNKRHAAAKVFSHPDVVAEVPWYGIEQEYTLLQKDVKWPVGWPIGGFPGPQGPYYCSVGADKSFGRDIVDAHYKACLYAGITISGINGEVMPGQWEFQVGPAVGISAGDEIWVARYILERITEVAGVVVSFDPKPIPGDWNGAGAHCNYSTKSMREDGGYEIIKKAIDKLGMRHKEHIAAYGEGNERRLTGHHETADINTFLWGVANRGASIRVGRDTEKEGKGYFEDRRPASNMDPYIVTSMIAETTILWKP

SEQ ID NO: 70331 - DNA, 1317 bp, Brassica napus
  CDS (43)..(1107)
ctaaacaacactgattgattatctttctctcgtgacggcgccatgtctctcctctcagatctcgtcaacctcaacctctctgactccaccgagaaaatcatagccgaatacatatggatcggtggatctggaatggacatcagaagcaaagccagaacactcccaggaccagtgagcgatccatcaaagcttcctaagtggaactacgacggatccagcaccggtcaagccgccggagatgacagtgaagtcattctataccctcaggcgatattccgtgatccgttcaggaaaggcaacaacattctggtgatgtgtgatgcttacacgccggcagggaatccaattccgaccaacaagaggcacaacgctgctaagatcttcagcaaccccaaagttgcctctgaggagccttggtatgggattgaacaagaatacacattgatgcaaaagggtgtgaactggcccattggttggcctatcggtggcttccctggcccacagggaccatactactgtggtgtgggagctgacaaagccattggtcgtgacatcgtggatgcgcactacaaggcctgtatttacgcaggtattggcatctctggtgtcaatggagaagtcatgcctggccagtgggagttccaagtcggtcctgttgagggtattagtgctggtgaccaagtctgggtcgctagataccttcttgagaggatcaccgagatctctggtgtcaatgtcagcttcgaccctaagccagtcccgggtgattggaacggagctggagctcactgcaactacagcacgaagtcgatgaggaacgacggaggattagctgtgattaagaaagccatagagaagcttcaggtgaagcacaaggagcacattgctgcttacggtgaaggcaacgagcgtcgcctcacggggaagcacgagaccgcggacatcaacacgttctcttggggagtggcgaaccgtggagcttcggtgagagtgggacgtgacactgagaaagaaggcaaaggttacttcgaggacagaaggccagcttctaacatggatccttacgttgttacttccatgattgctgaaaccaccatcctcggttaaaatcgcacacgttcttatgtttgggtttatcttatctggtctggttttcaatttgcaaacttgtgcttgtgattgccggtttatctcggtttaaataattcttatgacgacattttgtattttttttcttcctagtttcgaataattaaataaggtattcatatggtgaaaaaagtctatcagcgacttttgtgcaaaaaaaaaaaaaaa

SEQ ID NO: 70332 - protein, 354 aa, Brassica napus
MSLLSDLVNLNLSDSTEKIIAEYIWIGGSGMDIRSKARTLPGPVSDPSKLPKWNYDGSSTGQAAGDDSEVILYPQAIFRDPFRKGNNILVMCDAYTPAGNPIPTNKRHNAAKIFSNPKVASEEPWYGIEQEYTLMQKGVNWPIGWPIGGFPGPQGPYYCGVGADKAIGRDIVDAHYKACIYAGIGISGVNGEVMPGQWEFQVGPVEGISAGDQVWVARYLLERITEISGVNVSFDPKPVPGDWNGAGAHCNYSTKSMRNDGGLAVIKKAIEKLQVKHKEHIAAYGEGNERRLTGKHETADINTFSWGVANRGASVRVGRDTEKEGKGYFEDRRPASNMDPYVVTSMIAETTILG

SEQ ID NO: 70333 - DNA, 1589 bp, Glycine max
  CDS (320)..(1390)
atttccggggtttcagttatagcataaacttcactttatttcttttttataaaaagaaaaccatagattatcactatcttatatcttattccgggtctcaagattcaactgtgaggaagaaaaaggtctccaaacacatagaagcacgtgtatgtatgtattgtgcaagtcatagtattcaacgttaacaccactgactcacttataaaaggcgctttaacaccaaacggagtctccctatcaaaaaaagctacctagagcttgcacctattggtatcttctacaatatcctaaagtgtttttcttcttcttcatcaccatgtctttactttcagacctcatcaacctcaatctctcagaatccacagaaaagatcattgctgagtacatatgggttggtggatctggtatggacctcagaagcaaagccaggactcttcctgggccagtgagtgaccctgcaaaacttccgaagtggaactatgatgggtctagcacagatcaagctccaggggatgacagtgaagtcattttatacccacaagctattttcaaggacccctttaggagaggaaacaatattcttgtcatttgtgatgtgtacaccccagctggtgagccacttccaaccaacaacaggtatggtgctgccaaaattttcagtcaccctgatgttgctgctgaggaaccatggtatggtattgagcaagagtataccttattgcagaaagatgtaaattggccacttgggtggccacttggcgggtttcctggaccacagggcccatactactgtggaattggtgctgataaagcctatggccgtgatattgtagatgcacattacaaagcttgtatttatgctggcattaacattagtggcatcaatggagaggttatgcctggccagtgggaatttcaagttggtccttctgttggtatctctgctggagatgaggtgtgggctgctcgctacattttggagaggattacagagatagctggagcaattgtttcatttgatcccaagcctattccgggagattggaatggagctggagctcactcaaactacagcaccaagtccatgagagaagagggtggttatgaggtgatcaagaaggccattgaaaagcttggattgaggcacaaggagcacatcgcagcatatggagaaggcaacgagagacgtctcacgggaagacatgaaactgcagacatcaacaccttctcttggggtgtggcaaaccgtggaagctccattagagttggaagagacacagagaaaaatggcaaaggttacttcgaggacagaaggcctgcttctaatatggatccctatgtagtcacctccatgatcgcagagactaccatcctctggaaaccatgaaaacacagtcatatgtctctagatttggaccacttaaaattgtgtgttcaatagtcatttgatctaaaattttatatttgcaaggtgttgtttagttaggaattgccaagtggtcttttgagcctccatgtaccatgtgtatggtagagaataatctcgtcattaataacaagaattgcttcttaaaaaaaaaaaaaaa

SEQ ID NO: 70334 - protein, 356 aa, Glycine max
MSLLSDLINLNLSESTEKIIAEYIWVGGSGMDLRSKARTLPGPVSDPAKLPKWNYDGSSTDQAPGDDSEVILYPQAIFKDPFRRGNNILVICDVYTPAGEPLPTNNRYGAAKIFSHPDVAAEEPWYGIEQEYTLLQKDVNWPLGWPLGGFPGPQGPYYCGIGADKAYGRDIVDAHYKACIYAGINISGINGEVMPGQWEFQVGPSVGISAGDEVWAARYILERITEIAGAIVSFDPKPIPGDWNGAGAHSNYSTKSMREEGGYEVIKKAIEKLGLRHKEHIAAYGEGNERRLTGRHETADINTFSWGVANRGSSIRVGRDTEKNGKGYFEDRRPASNMDPYVVTSMIAETTILWKP

SEQ ID NO: 70335 - DNA, 821 bp, Triticum aestivum
  CDS (57)..(560)
ctcatcatcgtcttccccccattgccattccctccttgcgagtagtagcagcagcaatggccagcctcgccgacctcgtcaacctcgacctcagcgactgcaccgacaagatcatcgtcgagtacctctgggttggaggatccggtatcgacatcaggagcaaagcaaggacggtgaacggccccatcaccgacgcgagccagctgcccaagtggaactacgacggctccagcaccggccaggctcccggagaggacagcgaagtcatcctctacccccaggccattttcaaggacccgttcaggaggggtgacaacctccttgttatgtgcgactgctacacaccacaaggtgttccaatccccactaacaagaggcacaatgctgccaagatcttcaacaccttcaagtggggcgtggctgaccgcggcgcgtccatccgcgtggggcgcgacacggagaaggacggcaagggctacttcgaggaccgcaggccggcctccaacatggacccctacgtcgtcacctccatgatcgccgagaccaccctcctcctctgagccagcagcagatgacacacgcacacgctttcttcctctacctcggagtgagagagggcgacgatgaatttctttctgcaaaacgtctcctgtttccatttcttttgcaaggtctagtctgtttttggggcgtgcctttcgtgtctttcactttactcgttcagataagagtcttccgtgtactctgaaaataatgttcttctttccgcattccgataaatgaaatcatggaaccggttgtgattcaaaaaaaaaaaaaaa

SEQ ID NO: 70336 - protein, 167 aa, Triticum aestivum
MASLADLVNLDLSDCTDKIIVEYLWVGGSGIDIRSKARTVNGPITDASQLPKWNYDGSSTGQAPGEDSEVILYPQAIFKDPFRRGDNLLVMCDCYTPQGVPIPTNKRHNAAKIFNTFKWGVADRGASIRVGRDTEKDGKGYFEDRRPASNMDPYVVTSMIAETTLLL

SEQ ID NO: 70337 - DNA, 1397 bp, Triticum aestivum
  CDS (62)..(1126)
gctgcacacctcatctcatatcattgccattccctccttgcgagtagcaccggcagcagcaatggccagcctcgccgacctcgtcaacctcgacctcagcgactgcaccgacaagatcatcgtcgagtacctctggattggaggatccggtatcgacatcaggagcaaagcaaggacggtgaacggccccatcacggacgcgagccagctgcccaagtggaactacgacggctccagcaccggccaggctcccggagaggacagcgaagtcatcctctacccccaggccattttcaaggacccgttcaggaggggcgacaacctccttgttatgtgtgactgctacacaccacaaggtgtgccaatccccaccaacaagaggcacaatgccgccaagatcttcaacacccccaaggttgcagctgaggagacatggtatggaattgagcaggagtacactctcctccagaaggacgtgaactggcctcttggctggcccattggtggctaccctggtcctcagggaccatactactgcgccgccggcgccgacaaggcgttcgggcgtgacatcgtggacgcccactacaaggcgtgcctctacgccgggatcaacatcagcggcatcaacggggaggtcatgcccggccagtgggagttccaagtcgggccgtccgtcgggatcgccgcctcagaccagctgtgggtggcgcgctacatcctcgagaggatcacggaggttgccggggtggtgctgtccctggacccgaagccgatcccgggcgactggaacggcgccggcgcgcacaccaactacagcaccaagtcgatgcgggaggccggcgggtacggcgtgatcaagacggccatcgagaagctgggcaagcggcacgcgcagcacatcgccgcctacggcgagggcaacgagcgccgcctcacgggccaccacgagaccgccgacatcaacaccttcaagtggggcgtggcggaccgcggcgcgtccatccgcgtgggccgcgacacggagaaggacggcaagggctacttcgaggaccgcaggccggcctccaacatggacccctacgtcgtcacctccatgatcgccgagaccaccctcctcctctgagctctgagcgaccagcagccaatgcctaccacaccgccggacgacacttaggctctcgaccttctcgatcgagggtggccattgattgatttctgcaaaatgtttcgtgttttccgtttcttttgcaaggtctagcctgttttgggggcgtgtctttcactttactcgttcagataagagtaagagtcctcagtgtgctctgaaaataatgttgtttcctcattcccataaatgaaatcatggaaccttgtgatggaaaaaaaaaaaaaaa

SEQ ID NO: 70338 - protein, 354 aa, Triticum aestivum
MASLADLVNLDLSDCTDKIIVEYLWIGGSGIDIRSKARTVNGPITDASQLPKWNYDGSSTGQAPGEDSEVILYPQAIFKDPFRRGDNLLVMCDCYTPQGVPIPTNKRHNAAKIFNTPKVAAEETWYGIEQEYTLLQKDVNWPLGWPIGGYPGPQGPYYCAAGADKAFGRDIVDAHYKACLYAGINISGINGEVMPGQWEFQVGPSVGIAASDQLWVARYILERITEVAGVVLSLDPKPIPGDWNGAGAHTNYSTKSMREAGGYGVIKTAIEKLGKRHAQHIAAYGEGNERRLTGHHETADINTFKWGVADRGASIRVGRDTEKDGKGYFEDRRPASNMDPYVVTSMIAETTLLL

SEQ ID NO: 70339 - DNA, 1326 bp, Zea mays
  CDS (17)..(1213)
ctgcctactacgagtgatggccagcctcactgacctcgtcaacctcgacctgagtgactgcacagacaggatcatcgccgagtacatctgggttggaggatccggcatagacctcaggagcaaagcaaggacggtgaaaggccccatcaccgatccgagccagctgccaaaatggaactacgacggctccagcaccgggcaggctcccggagaggacagcgaagtcatcctctaccctcaagccattttcaaggacccgttcaggaagggtaacaacatccttgtgatgtgtgactgctacacgccacaaggcgagccaatccccagtaacaagaggtacaaagctgccacggttttcagccaccccgatgttgcagctgaggtgccatggtacggtattgagcaggagtacactctccttcagaaggatgtgagctggccccttggctggcctgttggtggataccctggtcctcaggcaagagatcgatccttcttcaacttttatcgattgcatgcgagttatctgttggcggaagaggcagggctttgcaaagttatcaactgttcggtgtattttttatttatttatttttggcagggaccatactactgtgctgccggtgccgataaggcctttgggcgcgacgtggttgacgcccactacaaagcctgcctctacgccggcatcaacatcagcggcatcaacggcgaagtcatgcctggacagtgggagttccaagtcgggccgtccgttgggatctctgccggcgacgagatatgggtcgcccgctacattctcgagaggatcactgagatggccgggatcgttctctccctcgacccgaagccgatcaagggtgactggaacggcgccggcgctcacaccaactacagcaccaagtcgatgagggaggccggtggctacgaggtgatcaaggaggcgatcgagaagctggggaggaggcacagggagcacatcgccgcgtacggcgagggcaacgagcgccgcctcacgggccgccacgagaccgccgacatcaacaccttcaaatggggcgtggcgaaccgcggcgcgtccatccgcgtcggccgcgacaccgagaaggagggcaagggatacttcgaggaccgcaggccggcttccaacatggacccctacgtcgtcaccggcatgatcgccgacaccaccatcctgtggaagggaaactgataaaaccactgttcttctcctgcacgcatgcatccgccccgtgctgtcactttttgtttttcaaatttcgattcccgtcctaaagtttgttaccacttaaaaaaaaaaaaaaa

SEQ ID NO: 70340 - protein, 398 aa, Zea mays
MASLTDLVNLDLSDCTDRIIAEYIWVGGSGIDLRSKARTVKGPITDPSQLPKWNYDGSSTGQAPGEDSEVILYPQAIFKDPFRKGNNILVMCDCYTPQGEPIPSNKRYKAATVFSHPDVAAEVPWYGIEQEYTLLQKDVSWPLGWPVGGYPGPQARDRSFFNFYRLHASYLLAEEAGLCKVINCSVYFLFIYFWQGPYYCAAGADKAFGRDVVDAHYKACLYAGINISGINGEVMPGQWEFQVGPSVGISAGDEIWVARYILERITEMAGIVLSLDPKPIKGDWNGAGAHTNYSTKSMREAGGYEVIKEAIEKLGRRHREHIAAYGEGNERRLTGRHETADINTFKWGVANRGASIRVGRDTEKEGKGYFEDRRPASNMDPYVVTGMIADTTILWKGN

SEQ ID NO: 70341 - DNA, 1363 bp, Triticum aestivum
  CDS (16)..(1080)
cgagtagcagcagcaatggccagcctcgccgacctcgtcaacctcgacctcagcgactgcaccgacaagatcatcgtcgagtacctctgggttggaggatccggtatcgacatcaggagcaaagcaaggacggtgaacggccccatcaccgacgcgagccagctgcccaagtggaactacgacggctccagcaccggccaggctcccggagaggacagcgaagtcatcctctacccccaggccattttcaaggacccgttcaggaggggtgacaacctccttgttatgtgcgactgctacacaccccaaggtgtgccaatccccacgaacaagaggcacaacgctgccaagatcttcaacaccccgaaggttgcagctgaggagacatggtatggaattgagcaggagtacactctcctccagaaggacgtgaactggcctcttggctggcccattggtggctaccctggtccgcagggaccatactactgcgccgccggcgcggacaaggcgttcgggcgtgacatcgtggacgcccactacaaggcctgcctctacgccgggatcaacatcagcggcatcaacggggaggtcatgcccggccagtgggagttccaagttgggccgtccgtcgggatcgcggcgtccgaccagctgtgggtggcgcgctacatcctcgagaggatcactgaggttgccggggtggtgctgtccctggacccgaagccgatcccgggcgactggaacggcgcgggcgcgcacaccaactacagcaccaagtcgatgcgggaggccggcgggtacgaggtgatcaagacggccatcgagaagctgggcaagcggcacgcgcagcacatcgccgcctacggcgagggcaacgagcgccgcctcacgggccaccacgagaccgccgacatcaacaccttcaagtggggcgtggcggaccgcggcgcgtccgtccgcgtgggccgcgacaccgagaaggacggcaagggctacttcgaggaccgcaggccggcctccaacatggacccctacgtcgtcacctccatgatcgccgagaccacgctcctcctctgagccacccacccacggccatgcctaccgccgccagatcatgacacccaggctctcgactctctcgatcgagggtggcgattgattaatttctgcaaaacgtttcgtgtttccatttcttttgcaaggtctagtctgtttttggggcgtgcctttggtgtctttcactttactcgttcagataagagtaagagtcttcagtctactctgaaaataatgttgttttcgcattccgataaatgaaatcatggagccggttatgattctgtccaaaaaaaaaaaaaaa

SEQ ID NO: 70342 - protein, 354 aa, Triticum aestivum
MASLADLVNLDLSDCTDKIIVEYLWVGGSGIDIRSKARTVNGPITDASQLPKWNYDGSSTGQAPGEDSEVILYPQAIFKDPFRRGDNLLVMCDCYTPQGVPIPTNKRHNAAKIFNTPKVAAEETWYGIEQEYTLLQKDVNWPLGWPIGGYPGPQGPYYCAAGADKAFGRDIVDAHYKACLYAGINISGINGEVMPGQWEFQVGPSVGIAASDQLWVARYILERITEVAGVVLSLDPKPIPGDWNGAGAHTNYSTKSMREAGGYEVIKTAIEKLGKRHAQHIAAYGEGNERRLTGHHETADINTFKWGVADRGASVRVGRDTEKDGKGYFEDRRPASNMDPYVVTSMIAETTLLL

SEQ ID NO: 70343 - DNA, 1483 bp, Glycine max
  CDS (109)..(1179)
gaattcccgggtcgacttcgctgtcgacgatttcgtaatctcagaattctctaaaagagatctttttctgctctttgaagaaagaagggtctttgcttgattttggagatgtctctgctctcagatctcatcaaccttaacctctccgataccaccgagaaggtgatcgcagagtacatatggatcggtggatcaggaatggacctgaggagcaaagcaaggactctcccaggaccagttagcgacccttcagagcttcccaagtggaactatgatggttccagcacaggtcaagctcctggtgaagacagtgaagtgattttatacccacaagccattttcagggatccattcagaaggggtaacaatatcttggttatctgtgatgcctacactcctgctggagaacctattcccactaacaagaggcacgctgctgccaaggttttcagccatcctgatgttgttgctgaagtgccatggtacggtattgaacaagaatacaccttgttgcagaaagatatccaatggcctcttgggtggcctgttggtggtttccctggacctcagggtccatactactgtggtgttggcgctgacaaggcttttggccgtgacattgttgacgcacactacaaagcctgtatttatgctggcatcaacatcagtggaattaatggagaagtgatgcccggtcagtgggaattccaagttggaccttcagttggaatctcagctggtgatgagatttgggcagctcgttacatcttggagaggatcactgagattgctggtgtggtggtttcctttgaccccaagccaattaagggtgattggaatggtgctggtgctcacacaaactacagcaccaagtccatgagagaagatggtggctatgaagtgatcaaagcagcaattgacaagttggggaagaagcacaaggagcacattgctgcttatggagaaggcaacgaacgtcgtttgacaggacgccacgaaaccgctgacatcaacaccttcttatggggagttgcaaaccgtggagcttctgttagggttgggagagacacagagaaagcagggaagggatattttgaggacagaaggccagcttccaacatggacccatacgtggttacttccatgattgcagacacaaccattctgtggaagccatgagcaaaacctgcatgttttctccctttggatggaaaggaacagttatgcttttcttagtaggatttggtctctctctctttttaccttttgattggtactatggttggtgccttgttggttggtgcaactaactggcaagggttgttcattgttttcttctattcctttccctcgttttccgattgttacaatgacaataatttaatagttattatcagtcttgaacaaagaaatgctgattgtgaagtataataataatatatgaaattgtcatgttcattggagtaggaaaaaaaaaaaaaaa

SEQ ID NO: 70344 - protein, 356 aa, Glycine max; identical to SEQ ID NO: 21308

SEQ ID NO: 70345 - DNA, 1801 bp, Triticum aestivum
  CDS (351)..(1634)
gaattcccgggtcgacttcgctgtcgacgatttcgtgccttctttggacggttttttgcctccggtgcagctgcaagggccgcctcaaatctcgtccacccagagccctatcgcctaatcaagagccagatgccactgcccgcgccgcggccactagaatctcccccgcaatctaaattacttataccaccggcctccgcttccataaataatatttccagcgcgatctcgcaaggtcgttccgccccccttccctccctcctctcctccctcgtctcgtccccgtcgttgtctctccgctagcgctgaaggggaaggcggcggagtaagtaggtaagcacgcagcggcgatggcgcaggcggtggtgccggcgatgcagtgccaggtgggcgtgcggggcaggtcggccgtcccggcgaggcagcccgcgggcagggtgtggggcgtcaggaggaccgcccgcgccgcctccggcttcaaggtgctcgccctcggcccggagaccaccggcgtcatccagaggatgcagcagctactcgacatggacaccacgcccttcaccgacaagatcatcgccgagtacatctgggttggaggatctggaattgacctcagaagcaaatcaaggacgatttcgaagccagtggaggacccgtcagagctaccgaaatggaactacgatggatcgagcacaggccaggctcctggagaagacagtgaagtcatcctatacccacaggccatattcaaggacccattccgaggaggcaacaacatactggttatctgtgacacctacacaccacaaggggaacccatccctactaacaaacgacacatggctgcacaaatcttcagtgaccccaaggtcacttcacaagtgccatggtttggaatcgaacaggagtacactctgatgcagagggatgtgaactggcctcttggctggcctgttggagggtaccctggcccccagggtccatactactgcgccgtaggatcagacaagtcatttggccgtgacatttcagatgctcactacaaggcatgcctttacgccggaattgaaatcagtggaacaaacggggaggtcatgcctggtcagtgggagtaccaggttggacccagcgttggtattgatgcaggagatcacatatgggcttcaagatacattctcgagagaatcacggagcaagctggtgtcgtgctcacccttgacccaaaaccaatccagggtgactggaatggagctggctgccacacaaattacagcacattgagcatgcgtgaggatggaggtttcgacgtgatcaagaaggcaatcctgaacctttcacttcgccatgacttgcacatagccgcatatggtgaaggaaacgaacggaggttgacagggctacatgagacagctagcatatcagacttctcatggggtgtcgcgaatcgtggctgctctattcgtgtggggcgagagactgaggcaaagggcaaaggatacctggaggaccgtcgcccggcctcgaacatggacccatacaccgtgacggcgctgctggccgagaccacgatcctgtgggagccgaccctcgaggcagaggccctcgctgccaagaagctggcgctgaaggtatgaaggacctgaaaaggccgaattcttccggggaaaagaaaataaatcggcgagaccgttggccgtccattcttgttgatcctgtggttccgtcggggcactgtctgtacaaaatcctcacagtttgtagaaccacttcgcatgttttttcgcgtaaaaaaaaaaaaaaa

SEQ ID NO: 70346 - protein, 427 aa, Triticum aestivum
MAQAVVPAMQCQVGVRGRSAVPARQPAGRVWGVRRTARAASGFKVLALGPETTGVIQRMQQLLDMDTTPFTDKIIAEYIWVGGSGIDLRSKSRTISKPVEDPSELPKWNYDGSSTGQAPGEDSEVILYPQAIFKDPFRGGNNILVICDTYTPQGEPIPTNKRHMAAQIFSDPKVTSQVPWFGIEQEYTLMQRDVNWPLGWPVGGYPGPQGPYYCAVGSDKSFGRDISDAHYKACLYAGIEISGTNGEVMPGQWEYQVGPSVGIDAGDHIWASRYILERITEQAGVVLTLDPKPIQGDWNGAGCHTNYSTLSMREDGGFDVIKKAILNLSLRHDLHIAAYGEGNERRLTGLHETASISDFSWGVANRGCSIRVGRETEAKGKGYLEDRRPASNMDPYTVTALLAETTILWEPTLEAEALAAKKLALKV

SEQ ID NO: 70347 - DNA, 1302 bp, Linum usitatissimum
  CDS (53)..(1162)
ttcagttttcggtgtcaacctccagcttacagaagagaggaaaataaatcaaatgtcgtccagtaatcttctctccgatctcatcaacctcaaccttcccgaggacaaggttattgcagagtacatatgggttggcgggtctgggatggatatccggagcaaagccaggacactgtctggagccgtgaccgacccttcaaagctacccaagtggacgtacgatggttccagcactggccaagctgcaggggatgacagcgaagtcctactatttccacaggcaattttcaaggacccattcaggaggggaaacaacatcctggtgatgtgcgatgcttacactcccgccggagacccaattcagaccaacaagagatttccggcagcgaagatattgagccgtcctgaagtggaagctgaggagccatggtttggcatagagcaggaatacactctgcttcagaaacacgtcgattggcctctcggctggcccatcggtggttaccctgcccctcaggggaaatactactgcggtgtgggggctgacaaggcgtacggaagggatatagtggaagcacatttcaaagcttgcctttatgcggggatcaatatcagtggcatcaatggcgaagtcatgcctggccagtgggaattccaaatagggccttcagttggcatttcagcagcagatgagctatgggtggctcgctatatcctccagaggattggggagattgatggagtggtggtttcattcgatccaaagcctgttcaggggaattggaatggagctggtgcacacacaaattacagcaccaagtcgatgaggaaggagggaggatacgagaaggtgatgaaggaagcaatagagaagctgagaatgaggcatgaagaacatgtggcatcatacggggaagggaacgtacgtaggctaacaggaagccacgagacagcggacataaacagcttctcgtggggagtggggacacgaggagcgtcgatacgagtggggaagaagacggagaaggaagggaaaggatatttagaagatagaaggccgtcttctaacatggacccttacctcgtcatttccatgatcgctggaactactcttctctgggaaccacctcttactactcctccccctccatcatcttcttaattatcttcctcttgatcaatgtctctgtttttatatacttcgtatttgtcatgtttgggttactctgttattcggttgttgaagtaaagggttaaattcctaatatgtcatgacattttagagctaaaaaaaaaaaaaaa

SEQ ID NO: 70348 - protein, 369 aa, Linum usitatissimum
MSSSNLLSDLINLNLPEDKVIAEYIWVGGSGMDIRSKARTLSGAVTDPSKLPKWTYDGSSTGQAAGDDSEVLLFPQAIFKDPFRRGNNILVMCDAYTPAGDPIQTNKRFPAAKILSRPEVEAEEPWFGIEQEYTLLQKHVDWPLGWPIGGYPAPQGKYYCGVGADKAYGRDIVEAHFKACLYAGINISGINGEVMPGQWEFQIGPSVGISAADELWVARYILQRIGEIDGVVVSFDPKPVQGNWNGAGAHTNYSTKSMRKEGGYEKVMKEAIEKLRMRHEEHVASYGEGNVRRLTGSHETADINSFSWGVGTRGASIRVGKKTEKEGKGYLEDRRPSSNMDPYLVISMIAGTTLLWEPPLTTPPPPSSS

SEQ ID NO: 70349 - DNA, 1528 bp, Zea mays
  CDS (112)..(1182)
gaattcccgggtcgacttcgctgtcgacgatttcgtcccctccttcctccttgggttcccagcccgtgcgccccgcctgtcgcagtcgcagtcgcgccgcagccgccggccatggcctgcctcaccgacctcgtcaacctcaacctctcggacaccacagagaagatcatcgccgagtacatatggatcggtggatctggcatggatctcaggagcaaagccaggaccctcccgggcccggtaaccgatcccagcaagctgcccaagtggaactacgacggctccagcaccggccaggcccccggcgaggacagcgaggtcatcctgtacccgcaggccatcttcaaggacccattcaggaggggcaacaacatccttgtcatgtgcgattgctacaccccagctggcgagccaattcccaccaacaagaggtacagcgccgccaagatcttcagcagccctgaggtcgctgccgaggagccctggtatggtatcgagcaggagtacaccctccttcagaaggacaccaactggcccctcgggtggcctattggcggcttccctggccctcagggtccttactactgtggaatcggcgcggagaaatcgttcgggcgtgacatagtcgacgcccactacaaggcatgcctgtacgcaggcatcaacatcagtggcatcaacggggaggtcatgccggggcagtgggagttccaggtcggaccgtccgtcggcatctcttcgggcgatcaggtgtgggttgctcgctacattcttgagaggatcaccgagatcgccggcgtggtggtgacgttcgacccgaagccgatcccgggcgactggaacggcgcgggcgcccacaccaactacagcaccgagtccatgaggaaggagggcgggtacgaggtgatcaaggcggccatcgagaagctgaagctgcggcacaaggagcacatcgcggcctacggcgagggcaacgagcgccggctcaccggcaggcacgagaccgccgacatcaacaccttcagctggggagtcgccaaccgtggcgcgtcggtgcgcgtgggtcgcgagacggagcagaacggcaagggctacttcgaggaccgccggccggcgtccaacatggatccctacgtggtcacctccatgatcgccgagaccaccatcgtctggaagccctgaggcatcccgtggccgtgtcgtgtcggtttgctccgcgtacggcgctggccgttgcatcgcagggcccagcggttgcgcaactattttcccttccccgttctgtttgcttgtactactactctaccgctagtcctgcatagcattttagctagaacacaacaacagcccaaaaaaaaacattgttgcttgcttcggcttcgacgcttcccaccacttccattccatgccgtccgtccgcttccttcctgtgtaatcctcctccaataatagacgtgtcatgctgcatcctctgcattgtataaaagtggcgtaattcttttgctacgcctccaaaaaaaaaaaaaaa

SEQ ID NO: 70350 - protein, 356 aa, Zea mays
MACLTDLVNLNLSDTTEKIIAEYIWIGGSGMDLRSKARTLPGPVTDPSKLPKWNYDGSSTGQAPGEDSEVILYPQAIFKDPFRRGNNILVMCDCYTPAGEPIPTNKRYSAAKIFSSPEVAAEEPWYGIEQEYTLLQKDTNWPLGWPIGGFPGPQGPYYCGIGAEKSFGRDIVDAHYKACLYAGINISGINGEVMPGQWEFQVGPSVGISSGDQVWVARYILERITEIAGVVVTFDPKPIPGDWNGAGAHTNYSTESMRKEGGYEVIKAAIEKLKLRHKEHIAAYGEGNERRLTGRHETADINTFSWGVANRGASVRVGRETEQNGKGYFEDRRPASNMDPYVVTSMIAETTIVWKP
